United States Patent Application Publication US 2011/0183924 A1 - sequence listing, part 258

SEQ ID NO: 735293 - DNA, 188505 bp, Homo sapiens
ctccaaggctgagggatgaggagacctgctgaggacccagggccttatctttccatcccactccataggtcccagtattgactgatgctgtcttcacctcctagcctcacttttaaccttctggcacccgcccaccactgtccagttcactattgaagccctgccgtccagtgctgcagagggaaaggatgttcttctactggcctgcaatatttcagaaactattcaagcctattattggcacaaggggaaaacggcagaagggagccctctcattgctggttatataacagacattcaagcaaatatcccaggggccgcatacagtggtcgagagacagtataccccaatggatccctgctgttccaaaacatcaccctggaggacgcaggatcctacaccctacgaaccataaatgccagttacgactctgaccaagcaactggccagctccacgtacaccgtgagtgattcccccatacctctgggtgctggcggtcagttctgcttcacacacatgagattgtcaggcctgggctgtgcctgcatccccctctgcattttgtcccgtgttgagatttgggcatttagtgcaggacacacacatggtaggtaaacttcaacagatcagaattcctttcctgcatccaggccctgcagacactgatggcgggggcgggggggcctcagcagggggaggtcagtctcagccaagcaccccatgccctccccatgaacctgaccctgagaaagaccctggagaactgggtcagggcctggcctgagggcgtcctgggaacctcacaaaagcccagcctcaggactcctgactccgtgtgaccccgggaagcctgtgtcagggctggggtgtggtctcctgggcagggcttactgggagcaaggatttaccagatgtctgcgggctgtggttcctgaagcttctcatcagtgagggctcagctcccagagtctcatctagacaaggacagagcctaccactttccctgggactcagcctggagagggcagggggacaggattactagggcattggccccctgaatgaggagcttaagagatgcccttgggcagtcagtggcccaggggtaggaacagaggggagaaaatgttcctggcagcttcttgtccaccggggatcatgcccaggggtgctctcccatggaggcaaataacagatgctgttgatgtgaacacctcctctgtgccaagcttcatgtcagatcctgtgaataatttaaagttcattcacagacaaagtggcaagcctcagaccattttccatttacatattgtatggaggggaaactgaggcacagagagatacagacaccggccacggtgggcagatcgcagctggcagagtcacatgagggctgtctgcagctgctgccacgtcctctccttcatccctggtgccttactaggtgtctgtggaccttagaacagccactggttcggatgttttcttcttaggtgtctacagctcggagggggagattctggtctggagagttatgagtaaatacagaattaatcagttttttcttaactaaatcacctgcctcaacaatcagtcagtgctggggaagttcaggcctcctcgctcaggtccacaccccgcatctctggacatgaaatggcttcgtgtgttttctgatgtgtgggtatcattccaacaggaggataaaggggaggactttgctttctctccccattcacaccctgcaccagccagggcccagtgtgagacacatactccgtagttctctcatgaaggagggagggaatgaatgaaggaatgatctataacctcttcagagacagagacctggatacaagatcctaggaggttctgggcccaacgtgagacacacactctgtagttctcttatgaaggagggagggattgaatgtaggaatgatctataacctcttcagagacagagatgtggatacaagatcctaggaggttctggccacacctgttttctgtccctctagagcctaagacccatgtctcattcatctggcccgtttctcctaaatctgcccctgggagctgagtctcatctgaccctggggctgcagggctgtgggaaggttttcaggggagggatcaggcttgcgggtagtcccacacgtttgccttacaccctggagctctacctggttctcactatgaatatcccataataatcccccctatcctttctggggagtagaaaaaaagtaaatatttaaaaatatgccagagcatctgttcttcttagcaagttcagatagttattagttagcaggaataaatcgttattttaccagagcctcacctgctgggggtttatgggagcctaactgactgaggggggtgggaaatatccaactccagccccctctagccatcatgtcccacctaaaggagagaaaaaactgagaggcacttgtgacattcacagcccagggcacagactctatccaggaccacagaacccctccctccccccactcaccaccgcatcactgaacgcctgctcacccaagttcctgttgcccagtacatcatgtcctggctttcaacaaaaactacaagacagactagaggcaaaaaaaaaaaaaaaaaaaatgcagttcgaaagacagaacaagcatcagaaccagatgcagatgtggcagggatgtggcagggatgttgaaattatcagaccaggaatttaaaacaactctggggccaggagcggtggctcatgcctgtaatcccagcatttgggaggccgaggcaggcagatcacctgaggtcaggagttcgataccagcctggccaacatggcaaaaccccgtctctactaaaaatacaaaaaattaggcaggcatggtggtgggtgcctgtaatcctagatactcggaaggctgaggcaggagaattgcttgaacctgtgaagcggaggttgcggtgagcctagattgtgccactgcactccagcctgggcaacagagcgagattccatctctaaaacaaacaaacaaaaaacaatactggctaatatgctaaaggctgcaatggaaagcatagacaatgtgcagaacagacggatgctgtgagcagagagatggacaggctaagaaagaataacaacagctactatatctatctatctatctatctatctatctatctatctatctatctatctatatatatgtatatatatgctagagatcaaactcactgtaacacctggatctcagagtggttgtgaggatgtttattaggagattaaagagattaaagcagagttatacacagggcgagagctcaactgatgctatcaactagtattcttatttttttgatgttgttattggcaataaaatcaggaacaatgcagtaaaaatttggttttatcatgtacgagttctgtgaccttccttgacttactgaggtactgtaagtctcagattctaactctgcagatggcggtgatgcccctctccctcaaggtgatgtgaggatgagatgagctgtaggtaggttggtgcccactgtgcctggcacatggaaggcccctgaaaatagtcaatgaacatcatccccgctcatcagcatggagttgacagtgagggctcgctctctgtgacaatcatggaatggaaaagaagaaacaagaggaagactgggcgcagtggctcatgcctgtaatcccagcactttgggaggccgaggcgggcagatcatctgaggtcaggagttcaagaccagcctggacaacatggcgaaatttcatctctactaaaaatataaaaattagcctggcatggtggcacaaacctgtaatcccagctacttgggaggctgaggcaagagaatcgcttgaacttgggagatggaggttgcagtgagccgagattgcgtcagtgcactccagtctgggtgacagagcaagactccatccaaaaaaaaaagaaaaagaaaaaagcaacagagggaagaggtgtgacatgagaggaagaagggatttaaaggtacaggagcagggcgaggtgcaagcacctgtgggagaatgtaggagttggtacatcccagtgtgtcaagtctgagacacagaaaatggtgcaaccgtggagagcaagggagtcagctatgaggacagcccaacagaccacactcaggctctggagcatttccttcctccctgactatgcccctgccctgcaatgccccttatggtttcccttggaacaaacttgggccttgtcccctttgccttcccctttctgcagaaaacaacgtcccaggccttcctgtgggggccgtcgctggcatcgtgactggggtcctggttggggtggctctggtggccgccctggtgtgttttctgcttctctccaggactggaaggtaccgcagcttttccccagcctcctcccacccctaggctgaccccagtcagggaggagggagaccccgccctgtattcagggccaggctttccgcatcctcccaaggaatccttccctctcattccatggctcctcccttgccagctgctgatcctaggctgcctcttcctttatgaatgtggcacagttaaggttgcacccctgagtgctgtcctagttccctaacacagcaaagccacagctgcctggagggaggaagggagggagggagggagggagataagacgggagtgctcagaacctggtaccttctgctgttcattgaatttacccacccagtgaggagggatttgcaggcttgagatccatggtgggggtcctgggcatggtcacgcagtggggagtggcaaagcctggacaggctgggtagggtcagcaccccatcgtgattgatgtccctgaggtgtgagatgggagaacctggacctcaggacctgctgtcctttatgtctcttgccaaggggtggagagagagaggacaaggccattgccccatttcagcatctccaggcctgaaaggagggtctggccatggcagggatactgagttctgggagaatatgatacatgctccttgcctccccatgcccccagctcccccagtgtcctgcacacacagccggccctgctttccctctggggccttgacccttcctctcaggcaaacgcaggtggtctgattccctccctgagtcctcagtccctttcctgggtccctgggtcaatgttctcctcacccggcatctgcctgggggggtccttcctctctggccaggacagacgtgactgcttaaggcctatcctcagctccccgtcctcggccgctcctaccacgaaactgatggagacaggaggccttcactccagtccttgaaaatggagtcccttccttgtcctttattctgcccctaaacctgtgatttctccctgcaccctcatgaataatcctgacctttcctagggccagcatccagcgtgacctcagggagcagccgcccccagcctccacccctggtgagtgtcccttcagcccaggtgtgggagcccctaggcctgccctacggtgtccactcctgccagtcaccccctgggggcctctgaccctttctttggggctgcaaggaggatgtcaggaaacatgacacaggggaccccgactgtcttgttcagactgatctgtgggctctgggtcgtgggtcacctcctcgacctcagctgctcaggtctcccctgggaagaggctccctctccctgattctctgggagctgaggacccctacactctcctgcaggaggggcccaggctctcctcccaccctgctgctcactcctgtctctgtccccaggccatggtccctctcacagatccaccttctcggtaagcctgttccctccccagcccttttctactggggtcccaacagtgcaggctcagggcagggggaccatcaaccccacagcacagcactgacccacctttccccagaacagtcaggtcaaagtgagtgcctccagccaggatccgggcctctctacagggccaggaccacccacgccatgtgctgacccctccccgggaccctctacacctgaggagaaccctggagtccagcaggtgcagaatggacactgggaccatcagtcagaggcccacattaacaagggtgcggggtgggcccagccaggacaggggtcagggtgttgtgtccacactgggaggctgagctcaggggcagagctggtcaatcctgaggggaaatgagtggaagtggaggcagggaagtaagtcctggccgatcagagacaggaaccttccaggctgggcttccgtgaccctccctccctgtcccctgacatctcctctctcccctgcccaggcccctctacccagccccagaacagccactcccatctatgaggtgagtgtgggccatggatgttctggtcccgcaggctccaggggacccaggatctgcccccaccagcacctggctgagctcagattcaggaaaatgcagtgaaaatgagaacaggtggtggtgagcagaggagggaggggcctgggaacagggaccccctgagcacagccaggttcagccccagagaagccctgggtgggcccagagcctgggagatgccagacactgttctgagaaggctacaggggttgaggcctcttctctgtttttacaggaattgctatactctgatgcaaacatttactgccagatcgaccacaaagcagatgtggtctcttaggttcctctgggagctgctcttgtgggttgatggagcgtccccaaagctcccagccctggggacggggaaggacatggagcctgagccagagaaccagctctgagtcctgaggagacacaggcctggggacagggagggatgggagtccctgctgaatatctggagaccctgacaggttgccctgggctctgggtgggccgggacaaaggcctctcatcaccacaggaagcgggggcttgcaaggaaagtgaatgggcctgtggcccacccggggtcaccaggaaaggatctgaataaagaggacccttcctctcattggctctttttctgctcacgggaacttagcagaaactcacctgaaactccgtgtccattctctcccgggtcacacagggaaaatatctccaccttgtctcaaccacagtctctcttccctgggaggcagaaataggggttgggagtcaggctggggtgggccctacacaggaaagggcaagattcacatgagccctgcccagccagccgagcgctcagctgtcctcacactaccccagggaccaaggccatgcacagccccagcctgggtccctctgtgaatgcatgtggggtctcaggagcacagaagatggggccatctgatgtccacaaaaggtgagcaatgcgggagcaaccatgggtggtataggttgcggctgtggcccctacgcagcctccagtgtcctgacccctgctgccctcttcacccaggccctggaggcccagtctatcactgtcctccacaaatgaacttacctgtccccaaatccaggatcctgtgtgcttatacctggccactaggttctcctctgtcccagtggctactgctcaggacatctttatccctggtggggcacagagaggggctgtcagagcaaccaagattaatacagacgcataattcagtccttgagcactacccaggactctggcccctcattgctcatcagttcccactttaccccctggcatggatctcactgagcaagccaactctttacacaggagcatccaggtcagaggtgcaggactcccccatctaaagctcatgcaggctcccatggcgatgggacaacctgtctgctcctctccctggcccacagccctatctcgcctgcagctcctccacacacctgggacagcagttctcagcccttccctgagggcccctggaagggtgatgatctcatataggttcacttgaaccaggtgccaccttcccacaagtgagctggtgcctgcactaaagcacagagccacagttcccaagagtgttctgccactgccacaggtcccaagagtgttctgccactgccacaggttgttcgtcctgagatgagaggtaagaaaacaacccgcaatgggttgttttatatcgggatttgcatcaggatttagctctaaatgacccctgatcccacctgcacacagcgtcagatgagacaaggtgaggcctctttagttttctgttgaggctgtgacaaattaccacaagcttagtgacatagaaacctgaaccaaagtgcccacatggctgtgttctttctagaggctccagggaagagtgcatttcctctccttttccacctcctagaggcctcctgcaaccttggctgtgtcctctttctccatcttcaaagccagcagcacagcatcttgaaactattctgtgccctgcttccatccccacatctccacctcctcccacctccctctctcacttaaaaggaaggagccttgtggttattttggacgcacctgggataaaccacaacaacctccccatctcatgatccttcctttaatctgtaaagtgtcctttaccacgtgacatgtccacagatctggggatgaggatgtacacatctttgagaggcccttgttctgtccatcactcctctcaaggccatcttctcatcatcgttcactacaaactacacatgggcacctggatgggttcatcatgactgtggcgtcagttcctgcattaacatccccagcaccctccagatcctgagagagggagacggagggctctccatgcccctagtacctctccaccttcttcttggtgacatgcttagttgctaagaataacagaaagcggaggtgactgaaagatcacaactcaccggcccttcaatagttcgtggacatcagcaccacggacagtgactcagtgaggctaatttccaggtggcagcagggagcatgcagataggagggaactgcaggaaaagctgcccattctattctatatgagaaagagtgtaagaaagaggaagctattacagggataatgctattcttctctaatccataaattgcgaaacctttgcatgtctggatatcatggtttttagcacatctgctgccactccctgcagggctgattgctgcatccaggatgtggtctcttggggggctcacagcctgctttggcctcatggtgagtctccctgcccctgacactcaggccactgtctctgcctacaacatggtgggaaccttccatgattaacgtctgattctctgtgcctgacctttgaagcacatccatcactcagcctggagcatccgctgagctcagcatcctgctcctccatccccagctgagcccttgaggagatgcttgagaggatctcctgggctcctctgtgagctcctccaggctgagccttgtgcttggtgtcagaggcctttgccatctgcttgttctttccataggcaaataatcctcctcagggacaagtggggcctgaagatctgtctgaatatctatctatctatctatctatctatctatctatctatctatctatcatctatctatatgtatgtatatatgagaatgctttattaggcaaaactgcatactatgaacatgctttaaaatgcaacaggatgagatgtgaagacataaagaacaagtgtgtagtgacacatggctatcagaacacactgaagaatccacaccgcggccgagagcagtggctcacgcctgtagtcccagcacttttggaggctgaggcaggcagatcacttgaggacaggtgttcgagaccagcctgaccaacatggtgaaaccccatctctactaaaaatacaaaaaatttagccgggcctggtggctcatgcctgtagtcctggctgttcgggaggctgaggcaggagaattgcctgaacctgggagacacaagttgcagtgagctgagatcgcaccactgcactccagcctgggagatagagtgaggctccatctaaaaacaaaacaaaacaaaaagaatccacactgcttccccgcttcactttacccagaaaaggaatgttctaggccacttcctcttcagcacacatccccagggaactaaaataggttcacagtcacccccatcttcctcattcccatcacctcttacccacagaggcatctctggtcctacagatccagccctgccttcaagaggcacaggtccaacccatccagtgtccctgctagtcacacacagcactcagggtacaatggagggcttctgtgctttggatgggaacaaaccccacctcacattcccacacctgagaagccaccagggtcctctctgtcctgtcctcacactcaatgtctgtcctgggtcacccttgtcatctctcctggaaataggcatggctcctgacaggtaggattgaggctttgtcttttcaggagtccctcccactctgagcacatgaaactgctcagctccatgcaaccctctctcaccaggggccttgttctctgggtccctgaatacctgggtccatgccatgtacattttaagaaaaatgacagtgactctcaccctgacatcctcacccaaggcacgtgtctgacaagaatcaccaggtgagatacctgtggctccacacacctgaggcttcactgcgcaggggtgtcctcatccctctcctcccacccctagggacagtaagcaccacaggctgccttggaccaccagctccccctcccagacacagcctcagatctatactgacatgctacatggagaggctctgatgaacagcaggtattaggaaatcccaccgaaccaggtgccacttgcggccccactcctcctcatatctgtgactgggacagacacacataacacacctctgttcaccgcccagcccccaaggtcaatcacagtctgcttctcccctagatccactgctccccatgtcttccgtcctcagctgcatcctgggtggcctccttgctgttcttgtaccccagaggcaggttccaacctttgtgatgttgcctgcaatgcccaaactttcccttccccttccccttcccttttcccctcccccttcccctccccttcccctccccacccctatcccttcgtcttcccttgtcttcccttcccttccctataaagccaaacatacccatccacctaccttgtggtcaaagtcatcagcctcctgctccactcagtgttctctgaccctgcatatggaggtggtggcccctcctagaacacccaccactcactgtcagccttgcgtggtaatcacagattttgcaggggttacctgtgttcaggtgtgtcacctgtggaaccagaactcttggaaggactggcagagggagctgcttaggatatctcagggctcctggcatctggtctaccacagggctattaacaacagcacttagggacaaggtggaggatggacggttaagagggtaaatatggatgatgtgtgggcaaagaataggacacaggaacacatgcagtactcaaataattatgccaagaaaggtgaggacatggagatggacattcccatatacttctgatgggactgcagtttagtccctacagcaacattgacctcatcatgtttaacgcgcacacgctctgaccactatcctacttctgaaggcctccctgtgctgtgagctctgagaaggccaagcttgcctgttctgtctctgctaaagccagagaccagccaatagcccagcacagggtacttcataaatacatgttgaaggaatgagctccaggaacagtactccacatggtagagatgtgtgtatgaggatgttcactgcagaaggtcatgtcaatgtgacaagtgacgagcagcctcaaatccagcaacaggggtgtgggtaaaagatcatagtgtagccatgcaatggaaccaatgaaaaaaccacaattagagcaaatccacatgtattaataaaggaggtgccctccatacatgctgcacctaacagaatgttgccaaataagaatgaaaaatgatgatatttgggctgtaaaaactagaagtcagctaaataagaatgcatcgaaagtatttgtgaatgcttacaattttataatgccttggcatccgttttggatggaagttggactttctcataccagaagcagggctcagtcacctttgaaatagtttccagttctccacctccttccagttcctcagtgtgattgatcagatatctgatttatacaactgcctcctggtgacctcctccctatgggacttccggatacagcccgtatgactgccccactgaccccacaccctgcctgctgcagtgaccacctctaattacctggatctcatgtctgcttgcattaaatccaccaattaaaactccctgaggacaatctgtttgaataatattctgtaccctaataaaggccttgacccatgggttccccctctgtcctccccatactgcccctgacctctgtgtgtgtgtgtgggtgtgggtgtatgtgtgtgtgtgtgtgtgtgtcctccagacagggcctgtatcccccaggacctgtaagtaataaatctttattttcatcttatgtctctcgcaatcattggcaagagctctgcatcttaaagatcgcaaatttaagaaattggtgtagtcggcacaatagagtacctcttctgtttagcacaagatatctcggagctgctgaggcttttaacatcctcgccggtgtggctgcctcactggtgaggccgttctgttcagtgcaattcagttgctccactgtgtgctgctgtgttgctgctgtagagtgctgccatgttgttctccccaaattgttaccgagtaggaacctgtaatgtgctcccaaggtggtctaccccatgagaagggggattctccatctagggcaagggctaggtgtgtttctggaatcctaatagggaaggcatccacagagggtgaactccactcctccttagagtgaggagtgacatttcccatttattttccccatggaggtgccatgtattgactttttctttcactgtcccaaggttgagccaaggtgagctatggagaccagggcaagataccatttctgttagcaaagcaaatgggtgacaacgtgtggagaagctgtggttctcctgatggatatagcagagtgccatttagtaaaatcttgtcaggaggctgcccctggttagaccggcagtgtctgtagtcactaaggtggatgcgaattttaggccctgggccatggataatccctgcagacacagccgtggcttcatgtgatggggcaatcccgggctagtggctcccttgtttctgcatttcttgctgtggttgcacaatcaacacctcaggggttgattgggtcaccttggaaagagaaacagctgcctaggaggctggtgcacatggaggccaccctcaattttattctgctaacaagttgtaagattaaaacaacagggggctttgggtaccatcaggaacttgtcaagtaaacatccaaagacagaaagaagaaaaagaaaaagacattaaccgtctagaaatacaagccattttaaagattttgcttaaaagatgcgcttgggctgggagcggtggctcacacctgtaatcccagcactttgggaggccaaggtgggtggatcgactgaggtcaggagttcaagaccagcctgaccaacatggtgaaacctcgcctctactaaaaatacaaaaaattagcagggcatggtggcaggtgcctgtaatcccagctacttgggtggagaatcgcttgaacccgggaggcagagacggcagtgagccaagatcgcaccactgtactccagtctgggcgacagagtgagacttcatctcaaaaaaaaaaaaaaaaaaaaaaaaaagacgggcttgtttcgtcgttgtggagtcatcccagagagaggctactccctagagtcactgaccacctttcctcctccatcttttcctcttatcattctagagacagaaaacaagaatctcagctttaggtggctaacctcaccccccaagaaaagaaactaccactttgattgactacaaatccaagaaaaataaaagagaaactttaaaaagtactgagcaaaccacaggtctagcaaacataatgctagccctaggttacttattcatttacaacaaacccctagatataggaggaaaaaataaaaggtaattaaatatatacacatacaatattttaatataaatatataataaatagttaaattatgtatgtataatatgtaactaaatcaaagtaaaatttcatactttgattctattggaaattcaaaattcatttattaacttatatattaaggaatttatgtaaaaaaagatttttaaaagggcaccaatttgcttttgtgtctctacaacataggatctaatttaactttacatttgctaaatacactaattgacaaatattcatggatttaatcaatactggggctcaaattgtagccacacgtgggaatcccataaatttaaacactctgtccctattatcttgagaagaaaactaaatataaaattgaaaaaaacaggtatgtctcaatttacctgtaactttgcctaaatttcccggagtcatatacccattgctgtaaaacattctctattggacataggtgctctgagacaataaataaaatagaagtgtttttggtacttagacattggcttgacaaaatgggatcccatgaaacctcagttaagatagtgaatacggcccaatgtgagttgaaatggggcctttaaggattaaaacttattacatgaaacctagtaagtaatggggtgattatccatactgcttctccatttcatagcccaattttgacagttgtcaaatctggaaaaaacaaacaaacaaacaaaaaaacccctgggaatctgttgcctcacagagacacaaagtagacatcaaaattgtatatctcagttccagttccaaaatggtggcatagaagcaagctggctttactccttcacacagaaaaccaaaaacaaatatacagcaccaaaattattaccagatatattccagaactcaaatatgaaaatgaaacagttttcagagccacagagaagtgaaaaaaactcccgacagatgacaaaagaatcagatttccccatctgtaatgtccctccctgccccattctgcctggtaccaggtgtgtggaaaattttaccccaactcatggtttctacactgggaaatgtaagatcaatgcgggcaaccagtttctgcacaatcctgggttccctgtccctgccttaacccacaagaagcattgtgagtgcccgaagggagaaatttccctgaggacagtcaaagagtggggaggcaggactaccatctccttccctggaaactctgctgtgtaactcagccaagggagacatgaaatcagactggtgtttcagcagctccatgttgtagtaggtttgtttcacaggtatcctgggcatggacatctagccagctttcccacactgccaggatatcccctttgggacctccctcagttaggaagggcacactctgatcatttactagggccaaggtaaaccctaaaggtaacttagagatgaaaaggaggtagtgacctagcagtaaagaactctaagaaaatctatccaataaaaatcaaaacaagccagacaaagactaaaataaataatgaatccttcaatgtaaagacctggacttacatccacaagaaacagtaagcaggtaaccatgatctccccacatggacaaagtgaggaacaagtgactgatcctgatgagatggtgatgtgtgagctctctaatcaagaattcaaaactgcagttttaaggaaactcaatgatcttcaagaaaacatggaaaagcagttcagaaatttatcagagaaatttaacgaagggattgaaataatttaaagaaaacaaacaggaatcttggaattgagaaatatatttgctgaacaggaaaatttattagagtctctcaacagcagaatggatcagaggaaagaatcaacccaaataagactcccccaaggcataaaataatcgaattctcaaaagtcaagggcaaagagaagattttaaaacagaaagagaaaagaagcaaatggcataaagaagctccaattctgtggcaacagattttcagtggaaatcatacagaccaggagggagtgacatgacattctcaaaatgctgaaaaaatattgacatttgagaatactttatccagtgaagttatccttcaatataaaggagagagaaagtttcctagacaaacaaaagctgagataattcacaccatcagactagtcttcctgtaaatactaaagggtaaatactaaatacttcaatgtgaaagtaaaaaaaaaaacactaacatgcaaaacaaccacaacaacaataacaacatttgaaggtataaaatccactggtgaaattaagtacgtagacaaacccagaatactcaaatagtaattgtggaaagtaatccaatcataactctagcatgagtctcaaaatataaatctatcaaaaacaataatacattttaggaggccaaggttggcagattccttgaggtcaagagttcaagaccagcctggtcaaaatggtgaaaccccatctctaccaaaaaatacaaaaatttgcagggtatggtagcacatgcctgtcgtttcagctatttgggaggctgaggcaggagaattgcttgaacccaggaggtggaggttgcagtgagctgagattgcactactgcactccagcctgggtgacagagggagactctgtcttaaaaaaaaatagctacctgtttggagaaaggtaatataaaatatgtaaatagagacaaagtcaaaatttgcaaaggatgaaattaaagagtagagtttttttggggggttttctgtttctattattttatttgtgatctaagataagttgttaccttttcttctcttgaagatactttgttatatctatgtttttggaagtcttatggtaactgcaacgcaaaaaatctatgatagatccactgaaaataaaaaacaatgacttaaaacatactaccagagacaatcaaccacaaggaagacagtaaaaaatgaagaaaggaagaggggagttacaaaacaaccagaaaacaggcaacaaagtggcagtagtaagttcttacttaaaaatattgaacactgaatataaatggactctattctccaattaaaaggcatagagtggctgaatgctgcctatatgctgcctacaagaaaccacttcatgtaaaaagatacaaatagactgaaagtgaagggggtggaaaaagatatttcatgcaagtggaaaccaaaagagagcaggagtagctatactgatatgagataaactacaaatcaaagactataaaaagagacaaagaaagtcactatgtaatgataaagcgctcagttcagcaagaggagatgccaattataaatatctatgcatccaacacttgagctcccaagtctcccaagtatttaaagcaaacaatagtggatctaaaaggagagatagactgaatacaatattaattaggggactttaacaccctgctctcagcaatggccagatctttcagacagaaaatcaacaaggaaacttcaaagttaaactacacactagatcaaataggcctaactggcatttacgggacatttcactaactatctaactgttacagaattcacattattttcatcagcacatagaacattcttcagaacagaccacatcttaagtcccaaaaccagtcagaataaattcaaaaaagtttatatcacatcaagcatttgttctgaccacaatggaataaaactacaataaatgaataactttctggacacatacaacctaccaagatggaagcatgaaaaggcagaaaaacccaacaaaccaacatgaaactgtaacaaaaggaaaacccaggaccgaatgacttcactgctgaattctaccaaacatttaataagaactaaaaccaattctactcaaaatgctttaaaaaattgaagaggatggaacactttcaaactcattctacaaggtcagcattatcctgataccaaaaccagacaaggacaggacaaaaacaaacaaacaaacaaacaaacaaacaaacaaaaaaacactacaggattgcttgaggccaggagtttgagatcagcctgggcaacatagtcagaaccaatctcttaaaaaaaaaaaaaaagaaaaaaattagccaggcatggtggcatgtgcctttagtcctagctactcgggaggctgaggtgagaggaccaattgagcccaggaggttgaggccgcagtgagccatgtttgtgtcactgtactccagcctggggaacagagcaagatgctctctcaaaaacaaaaagcaagctgggtgtggtggctcctgcctgtaatcacagcactttggaaggctgaggtgggagaactgcttaagcccaggagttcaagaccagtctggacaacatagggggactccatctctcaaaaacaaccaaccaaaacaaagccaaaaaagaacataggccaacatcactaacaaacatagatgtaaaagtcctcaataaaatattaacaaaccatgtttagaaacacatcaaaagagatcattcactatgattaagtgagattcatcccagggatgccagtatggctcaacatatgcaaatcaataaatgtgatccatcacattaaagagaaccaagaacaaaaaccatataatcactccagcaagtgcagaaaaggcatttaataaaagaatgggttgagggagtggagcccatagtcagagcagcagtggtctgggattttggaagtagaaagaagggcagcaccactggccaggaccaccagggaacacccccataggccctgggtgttgtgctccagggagggttccctctggagttattaatcttggtgtccactttgcccagctgcccctcacagggtcagggaggatgaagggaaagcttccttctaatgaaagttcagggactcacagttcctagagcctgtagggagaggaagatcttcgaggaagagcacctgggcattggggcgtttgagaggaagatctatgccaggtccaagtggacaacctgtggactctctctccagggacatacgggtatctgggaatctcctgtagcttaaagaggtaaagacctctccctttagcctgaggactggaggatgctggttcaggtgaatgagtcctgcaggggctggtacaggcctggagggtggtggtgtccagggccttgggttcacccttagcatgattcaggccgggcggtgtttcacatgagcaagagggcctgggttcattgcttcaggacaatggtgaaatctcatggtggaagaaatcttgtccttgccagtgcccagctttcatttggtcttggcccagagtgtcctccctagagaagactcttgtcccttcttcacactgcccttcagggatatgccagccttatgggataagatggggtggagactgtagatgtgggtgggaatctctccacagagtgctccttctctcagcggttgcaccttgtctcagggcttcagcttgaaatctgggatctccaagcccttccctccccagtcctggccaggaccacatgggcagatgcattgtgtgaagtgcatttcatttggggtgtcctctctgcatggcaccctcccgttgattctctttgcgcatgtcagagtgcaggcaccatccacacctcctgctggaggagggacggagctgttgactcctgagagctgatcatgtgttcccaccctcacacacaatcatggtccatcctctgagggacatgtgttgccaccactgtggagatggtgcaactgacagtaacaaacagtaaaatctggtactgaatgggaccttaagccaacaatgacaatgtcattccaaggtgtttcatttttattgattcaatgcaagtcacctgatttcattgactattcacaatagctcgataaagtaaatgcatcatcaccaccactttaaagaggaaaaaggtgcttgggcagtttgtgactactgtggtggctgctgcattgctctctggtaaagccaagtaggtggtgggtgcggcctctgggctgggatgatccaccctcctggtggtggcaggggagccaagctggagccatggcctgtgcagtggtagcagctgaactgaccgctgctgcaggatttgcaagctgttacattttgcgaagccatgaagcacataaaacctcaagtagaacaagtgtttcaaagtctaccaaaatctgccttcagagattattactacagaggtggatatgaacccaaaatgacaaaacgggaagcagcattaatactagataatgaatgaacactagtaatagtagggtaagccctactgccaataaagaaaaaaataagagatgctcattaacatgttatgctcttaaatcacgcagacaaaagagggtctccttatatagtagccacaatcaatgaagctaaagatttactgcaagatcaagctaaaaacagtaggtgtataatgaatttttaacttcatattagtttatgtatatgaatatcaagtttttataataaaatgcctccaaacaaagaatatttgatttagggtttaataacttctaagaggggactcagatgtttcctgtttcacagtcagtctgagagggtcatttttcctggagctgacctgggtggaggcctcacactgatactccccagcatcctctctcctgatggggtttatgctgagcatacagtggccctgggacagctccattctctccatgagtcacagacgctggtcatggaagatccactggataaggttccagagtcatctgtggggcaggtcaggatcacaacatccttttcttctgtgactctggtgttgctgactcagatggggtcggagccactgaccctgtggacaatcagtggaggtgctcaactgaaagtgggctgagggcacgtcttctcctccatccctgggtccttaaggtaactgtggaccccagaccaactgacacaggagctagaaagaaattatttaggaagttagtgagggtaagagcgtccttggcaaggtttcccctttaacaaaaagcagcccaagataattccttttctaacaaagagcagcctgaaaaattgagctacagatgtagatgagcaagatggaagcttgcacaggtgaattccagtaggtgtgccaatagaaaagggctgcctggaagccaggtatgttcaacatggagactccatcctcccttttctccattaccacatgtacagtaaaaaaccaggcaacatggcaccggccaggtagacaatccatctgcatgacaaaagatcagagtggggcagccagcaaatggcacagctggtctaaacaatctttcaccccctgtataaatcagacactgcctcctgaagctcatctataaaaccttctgcatttcactatggaagtggcaacccattttccccaggacccctctctctgtgcagagagctcttctctttctttcccctatgaaacttccactcttaacttcactctgggtgcctgcatcctagttttccatggccatgggacaatgaacctcgagtattaccccagatgaatgatgctgtttcacaatcactggttcagctcccttcttcttagggtttcacagctcggtggggagaataccacgcctcagtggtctggggagtgaggaacaaatgaagaattaatcagattttacttagaacgctatcacctgcctcaaccatcagatccatgttgggaatgtccaggcctcctctcttagatctatacccacttcactggacctgaaatcctgtgtttcccgatgtgttggtgtcactcctatgagaggataaaggagagaactttgctttctctccccactcacaccctgcacaagacagggcccaatatgagacacacactcgctcagtagttctctcatgaaggagggagggagtgacctcgagtgattctgccatctgtagtctgtgtaccctggccagtggctgtatcttcatatgcctcagtttcccctcagtaaaataggacacacaatgagaactaaaaataaaattctaattccccagtgaactgaaaggatggcctcttggccaagcggatcccagagttcctgatcatgacaggatgggaggttacacctcattacagcccctccctttggaagtttagaggtgacaactgactagcattaacgctaaaatcgagatcatgagactgacagaacagactctctgtggccataagataccaaattataaactcaacctaaggtcatgcaggcaagggctaagccacactttcctacatttaaagaataagctatgttctaacacagaattttctttctctctagcggctaaagtaacactagccttcgagataagcaatattgaaatgatcgcggctcatccaccaacactggctaactgacccctgttccaacagccacaactacacttcaattggacaggagactgatttcagtaactttctcctaataagagaccactgagcatggcctggttctgctggtatacagacacggtgcactgagtaccataatgcttgtttcatcttttgatgtataagacctaatttaatacatttaaatctgaattctccaccccaaagtgaacatggggtgcatgtagcatgcatgtttgttgatcacgcatgtgcgtgtacttcctttgtgagtatccatagctccacctataacctgttgaatatgtatacctggccaactcattcagcataaatctatcttccacattcccctcccttgaagtgcctgctattggtctctgctggaggctgcatcttctaccctggggaatggccagcctgcaggctgtaaccctgtgtaagaaataacctggttgggtgcagtggctcacacctgtaatcccagtggtttgggaggttgaagtggtagaatagtttgagctcaggagccagagactagcctgggcagcatagcaagatcctgtctcttaaaaaaattttagggaggagagtgaggatcagaaaaaatacctattggctattatgcttagtacttggatcatgaaataatctgtataccaaacccctgattacatatataacaaacctgcatgcgtatctttgaacctaagataaaagtttgttttaaaaactatctgggtgcagtggtgcatgcctatagttccagctactcgagactgaggtgtgaggagtgcttgagctcgggggattgaggctgcagtgaattatggtcccacctgtgagtagccacttcactcaaacctgggagacagagcaagaaccggtctctaaaaaaaaataaaaatagaaaaataaaatgaaaaatatatgaaataaagtctcctttccaaacgtacagatctccgatttttctgccaacaatgataaatggtcagtggcttgccatgttgtctgtgaattacttttaaaatattcacgatcacctgacctaaaggttggtaccaaggaaccgcctgaatacaccgtctctgattatttgcctccaacagagtgttccctgggcctgatctctggtggacaatgagctgctgggaacatcctctcttctctattcctcccctggggatgctgaccttcccttggagtctcctaagttccccagggcagtcggctaatgtcctagggagcttacctgtcttctccataccaagtctcatgtgaaggacgaggctttgcccttgcccagatgaggctctgggggctgagccctggctggctaccagctgcaagagccatggcccttggacagctggtaaatccttgttcccagtcagccctgcccaagatgcctcaacccagccccggcacaggcttcccagggtcacatggagtcaggatcctgggacaggggactggacaggggtttccagggctgagtttctgaacaggggcttcccaggggtcccctcactccaggatctgacatggtcctacaaggaacgtccatggggaggggacccaggagggggaactgacactgacctccccttactgagcctccccccaaccccatcagactgtccttcctctgtagcaagtgcctgcagggtctggatgcaggaaagaaattctgatctgtggaagtttgtctcccctgtgtgtgtcttgcactaaatgtccaaacccccaaatgggatgtaatgtagagggggacacaggcacagcccaggcctgaaaatcctgtgtgtgtgaagcagaactgacccccaacacccagagctcatgagacatcactgtgtacgtgaaactggccagttacttcttcattcacaagatctgtttttatgacttgtagggtgtaggatcctgtgtcattgttggtgacattctgtatcagcagacatgtattggggtatattgtctctcagcctctgtggcaggtcctggggtaattacttgagttcctagtacatatcctgtaattcccctttgtaccagttgtagccaagcctaaggcagattgtgggtgagtggaagaatctccttgccttctgcagcttcaacagtgacttgggcagtggtaggcaagttccagaaagttaaaagtgaggctaggagtggggagagagcatcagttaatactgggccctatgcattgaggtggaaagatggggccctaggtcctggacaggtctcttcatccctcagccttggagtgtgtgtgtgtgtgtgtgtgtgtgtgtgtgtgtgtgtgtgcgcgcgcgcgcgtgcgtgcgtgtcctactgggccaaggtcagcagcatgacctcccttccttcagtgcctctgaccttggcatttccctgtttggagtccttttccccaggggtctgcctggctccctccctactgccttcaggtcctgctcacattagggcatccttgggagaccccttccctgacacctctagagaccctgggtcttccctttctgacctttcgctgctgtgttccctccagggctcttgtcaatacttgacctcacattctagatacccttgcatgtctgtcttcctccctatgagagcatgagctctgtgagaacagggacttgtgtgatcttggttgcaccccagtgcctgggacaggctgcggactcctgtggatgagctcatgagtgttcccagggcccttcacaacgtgggatttattttccaatggctgaggttgttggctaagagctctgttggagttcaatcaggctggtgggaaaaatattagagatagttatagagatagacacaaatcttcttggaagaccaaaaagtttgcataactttggtaatagatctgactgaaggtggtccctttacctttagttaaacaaattaaagtagtaacaaaggaaggcagagtagtttgtctagccagcttgtttactcatgtgatcttaagactaaccattgatgtgccacaggtgcttaattgctttctacttgggaagtccacaatgtcaattaccctctaacggtgttgactcaagcctttgttaattaatcttactgaataaatatgagtctcactagctgatcaaggccatggtcacaactgtttataggactcagcagggagtctgtaagcggccctgacagactcagctggactggcaaagcaaaatatgtgtgtgtcagtgtacactattcacccgtcccccacagctggtgcccctatatgaggagtgctgccacagagctctgtttagtgtcccttgttttttttcttgagtattaccccaacttaaattgtgattattgtcatctgttttcaacattaactgctcagtgatgattcacttggaaaacattaacaatcgagattgtttcttcactaacaacctcagattatttagattttcctgttgtaatcccttcttcctgtttagtgtccaacagaagccctctgtccctctcaggtccccgttctctccaagaaaccccagccagtctctgtgctccctcctcccatccactcccagggagccctcccctcacctgtgagcagaagcgcctgccagggatgtgcactctgtgaggaggggctgagggaggccccatgggctctgctgtctgctttgtcctcctctgtggagaggagcttgggcttcagaaaataaggaggccagaaagtaaggaacaggctgagaaataatggggatgtgtcgaaaggtcacagatgccaacatctttgtcctatgcaatattatccataaaattacaggtttgagatatgcttaaattttcttctaacatgcattaaaataaacatataacttttaatagttatattaaattgtatttaatataaattaaatgctcttgtcagagctactgtgactgtcagctctgctgtccttcctctctctgtgctaagcctcctcccagggcagaagcacttcccagggccaggggtgggggcggggaaaggtaagtggcaatgaggatctgcacaggtagcctttccgcctcctcccctctcagtcctgcctccttgtcttcttttcctctttttctccaatctacatttcagttccttagaccacgctgtgagaagcaaggcttattgggacccccatcccttaacaggatgacctgtgctccccataagtgacctctgctgtgtctagggattggctctgtcagcacctcacagagagtccctggggcccccaaactcagtgttattttctctatgacacagaaacccctctgggtatgcaaggttttcctcatgttttctaatgtctgggaaggttggatttactcccagcagggaggtcacagagatgtccagggagtggggtcctagaaatggacaaatctagagctaaagcccaggtctacgattttcagttgtttttttctgcagtgctatgtgaccctaatttcctaggagtaactaaaatgcaaacctcagacatttgtagacattttatgatttttctctacagcttgtaccactgttattattatttgctttatgctttttcctaaataaatttactttacaaaacatccttgtcctagtagggtgcaggggctcacgtctgtgatctcagctgcttgagaggttgaggtgggtggattgcttgaggacgggaatttgagacaaaacatctttgtcctatgcaatattatccataaaattacaggtttgagatatgcttaaattttcttctaacatgtattaaaataaacatataacttttaatcatcatattaaattgtatttaatataaatttatatacaatacatttttatataataaattatatatataaatgtatatataatagtttttcttttttgagatggagtctggctctgtctcccaggctggagtgcagtggcacgatctcagctcactgcagcctccgccttctgggttcaaacgattctcctacctcagcctcccgagtagctgggattacaggcgcctgccgccacgcccagctaatttttgtacttttttagtagagatggggtttcgccatgttggccaggctggtctcaaacacctgacttcaggtgatatgccgcctcggcctcccaaagtgctgggattacaggcatgagccaccatgcctggcctatatattttatataattatataaagttttctataataaattttatataataatatataaaatggatatttatttaagataaagttattagttttatatatttacatatatttaggaataaatgtgttactgtgggagcccagtgcccaggcaggtagtcagtacatgatggttgtcattagggttaatactttggaattctggattttttcccaagagagtgtctacgctggaatattgggcttgtggctttctgctgatgtgcatgtgtgaagaagctacttccacttattaggacttgtgtatctgtctcgcagtttcactacctattttctcgtgatgttggtcaagtcgcctaacttttctgtgcctcatttacctaatttgtagaatatgggtaacagtacacaagtgtgagtgtgtatttcccaggactgaccactagagggcgtgaaggcaccggcacttactattacagcaatgggtgtagtagtgctcatggtcgtaaacatcattctcccatgaaaggaaccagggcttcctgggagaaataactgattccagggctggggccggaaagcacaagcggagcctggagcatctcgtgaggccagaaagtaaggagccggctgaaaaataatggagatctgtcgaaaggtcacagatgccaaccagaaggagctttgaatgaccaattttgagacaaaatgagcactataagaaataatgatagtaataaattccaacccataaatacccatgagttcctactaatataaataaataattgaatacataaatatataaggatgaagaaacagctttttcttacagcagaattccaattaatgaatgtagaaggaatgatcaaatagaaaatcactatttggctaacagcacagtcaattgtttgtaggcaagaattatcaatggactttaaatatgaatgggtaaaagtatgatgatgctacaactagtgagtaccaagggggaaaaaaaagtacgttgagaagaaacaggctacttccatattcccaaagtatcacttcaggagctacttattgattataatgggacaaatagtaacttacagtagagaaacctggcaacagagtctctccgaggtacaaaggctctcttcaggaaggaggtaaggggaaggaagaagaaaacactgtcctgcctcaattatttgctttccccattctcaagtgtacttcatagacattcaaagatatgtgttgatagtgtccacgatccacatggctctattatagtcatttattcacacatacattcagtgaggctttgagtgcctaatgtgtgcctgatatttgctagatggtggatgctgagaagatcaggtgtgctgctgtctctagggtgactgaatccacctgccccactttacagatgtggaaattaaagtgaaaaggatttataggattagttcactgtcacaaggtcactagccttaaagttacaggagtaaagcaagtttcctgacttgctagattttctgctgcaggtgctgacaatggtgagctccaataggagagaggacactcagagtgaagtgggagccctgaacaccctggattagccaagaggacatgccgggtccagctgtgaccgcacaaaggaccattggggatatttgtattctctttttcacttagagcttgaaatgaggaaaactaagtgcagaaaaccaagagtggaagatttttcacaaagcactggtaacatgcatcagaaaaccctgtgctgatgtctgtcacggtgtttctcactgaacggtaatagtctggctttgagtgtgttccctctacagcctggagttctgcgaggcagggaccaggtgtgattcatctttgtctctccagtgacagtacacagcaggctctgataaatatttcttacaaaataaaatggaataaaaagtagacatctgcacaggtgtgggatgactgagcagcagcagaagcaggaaaagtcagcgtccccagatcagctgatgtggtgttcggattctagataggggtgaggtgccaggatggggatgggggtcctgtggctctgctgccctgggggacacccctaggtttcacagtgcctgctgtggttgctgcactttgcttccccatgggaaagtgatcagagggtgtggggcttcaggtgaccccatgtgggaaatggccaagggaaggtggggtgggcggcacatggttttttttaaccaatatttgaaggtaggttgtatgaaaaggtgttaggcttatttcagcttatggggagtaggacagggattggtgagtgtgtatcaggtatattttggctcaggatggaaaagaactgtcacagtaacataaggtcttttgggaaattacatgtttactggcagagttcaggccagggctgggtgtctgaaaatacctgtcagggtcacttttatggttacaagggcagagcttggcttggaaccaggtttcttactaataccacatattaagtattataaaaactgtcctttgcaataggacattgctctatgatgcaggttgaggtccctctgtttaagtaattgtgggtggctgtgattctctcatctagtctgcgacttggacttcacctccatctgcagtccctctcctttgctgttgacactggtcagagttaagcgcatttactgacgatggtcacagggtggcagcactgcctctctggtattttctaaaacctcttcctggaactgagccagtctaagaggatgtcatgactaagaaaagggcactaatgaggtgaacagataattttttttttcttgtttctcctgtgaagtaacagagtggaggtgagcatggaataattgccttttagaaatggaagacaatggagagaagtgtttcgcaaaccttaatgtgttcacagatcccacacagatctttttattcaatacagattctgatttttctggtgaggcctgagattgtgcatgtctaaggagcttttggatgatgccattgctgctggttggcggaccacactttgagtagcaaggctcgaagatcatttagaggttaattctcactgcatctaatttatggatgaaaacaaaccaaggtccagagagagcatatacagcttgcctaacaaagccattccctaagtgcctgacttcttgcatttaaacccagggcttcagcctttgtccagttctcactccacacatcacacggtttgttcactgttgtgaacgacagttgtggcagcatctctttagtttaggaatccagagccccaatttcactaccctctttggtcttggctcatgctgtgacttcgaatagttttgcccttacttaaaatcttcagtggctcttttgtaatcacaagatcaagttcgaatatctctgtctagtgttcatggctttataacatatggtatctctttagtaaccttacctaacttccctgttttaaaattgtctcttgctgccatagccctccttgctccttcctgctccctaacaaactgtgttcacttctctctcagtggtagtgatgatggcatggcctctgatgttagactcatgtaacttctaatcccagatccaccaccaacattggcaagttgattcatctttctgaggataagcatcctcctctgaaataaacttagatggcggttgagaggggtaaataaaataacacacaaacccactctcatccctgagaccctcttcaaaactagcatataaaaatagctatttgaagaggttcagtgaaattcaaggtaacacagagaaggaattcagaatcctatcagataaatttaatagactgaaataatttttaaaaatcaggcagaaattctgtagctgaaaaattcaattgacaaaccgaagaatgcactaaatctttcaacagcagaattgatcaagcagaagaaagaatttgtgagcttgaagagataatatatgaaaactcagagtcagagagacaaaagaaaaaagaattaaaagaataatgcatgcctacaaggtttgattattaagctactcaaagagatacaagagaagggtgaaaaccaacataaagaaatgtaaaaaacaatcagaatataaatgaaaaattttctaaaatgctagctagtttttttttgagacaggctcttactctcatcacccatgctggagtgaagtggcacagtcatggctcactgcaggctcaacttcctgggctcagatgattctcccacattagccttccaagtagctaggactaaaggcgtgtgccaccaggccaggctaattttttgtatttttagtagagatggggttttgccatcttacccagggctggtcttgaactcctgggctcaagtgatccaggagattcactgccaaaaaggatataaccaagtcatatagtcataggttatctaaagtcaatgtgaaggcaagaattctaagagcagtgagacaaaagcatcaattaacttataaaggaaaacctatcagtctaacaccagatttctcatcagaaaccttacaaaccagaaggtattggggtcctaatcttttggcttcttaaacagaatagctctcagccaagaatcttgtgtagagtgaaattatatttcaaaatgaaagagagaaatacagtctttttcaggcaagcaaatgcttcaggatttgtcacggctagaccatcctacatggaatgttaaagggacttctaaatcacaaaacaaaagatttaaatagaacagaatagaacctcttgaaaccaaaaaattcaaatggcctataaaacaataacacaataagaaaacaaagtagataacgatcaacatgatgactggaacaaatattaacattgaatgtaaatgacctaacactccacttaaaagacacagattggcaagataaataaaaaatcacaaaccaaatatcagctgtcttcaagagactcacttaacatgtaaggattcttatagactcaaggtaaagagatgataaaagatattccatgcaaatggaaaccataagtgagaaggaatagctatccttatatcatataaaacagactttaagcaacaacagtaagaaaaagacaaataaggcaactatataatgataaaaggatcaatcaaacaagaagatattacaatcctaaatatatatgcacctaactttggagctcccacattcataaaacggttatgatgagacctaagaaaaaagatcaacacaaaacagtgagggtgtcctgggttttctttttattggacagcagtgtactagcctatcactttcccagtcaggggatttttggtctccccattcccctaccatgggttcatgccaaagtccatattttttattagtgtttggaattggattttttttttttgaggtggagtctcgctctgttgcctaggctggagtgtagtggcacgatctcggctcactaacctctgcctcctgggttcaagcaattcttctgcctcagcctcctgagtacctgggactacaggtgcatgccaccacacccagctaatttttgtatttttagtagaaacgagatttcaccatattgtccaggcttgtatagaactcctgacctcatgtgacagggaaacaggcactcagtgaacttcatgcgattgaggagttaatgataatgagagaagggctgtgaggggacagcactggggacaccagagcctgtgacgggctgagttgctgtgccttgggagatgcccttttgactgagccctgggaaggagggggtgtgggggcaggagctgcctgcagagggagtggcctcaggtgggcggccacctggctgcagggaagaggtgacagagttcgtgtgcagagcttggagggtgaggaggaggtgggttgaggtgaccttggtgagggtgaaccatggggggctgtgggccctgctgagggaggccagccagccctggacctacagggtggtttggtcttttttgtcccattcccagcatccactgagtggtgaaactctgcaggccagggaccatcccactggccagaaggagcgcacagtaggtgcccactcagtgcatgttgggctggacagaacctcactctgccccctgcccccagctttgggagctgcagcaaggtccctccccctagggatctccatgcctctgtctctgaggggtgagatggggagacttcaaagggccatctcagagtgtgggggatagagacgcagaagtgtgggggatagagggaggcctgggctctagacccaaaggaccttacacacctcctgagtcttttcaaatggtttcttctgttactttaaaaatgatgtaagtcatcatatttattgtaaatcccaggaatctaatcatgcgtaaaataaggtgtcttatccttgaccccaccccttccccaattaaatttccaggatgttaccactgtttgcagttggtgtgaatctctctttaataatactctgtttatctcacttgtcgttttacgccaaaatacccattgaattatattattgctgaagaccattcttttttttttttttttttttgagatggattcttgctctgttgcccaggctggagtgcaatggtgtgatctcggctcactgcaacctctgcctcctgggttcaagtgattctcctgcctcagcctcctgagtttctgggattacaggtgcacaccaccacacctggctaatttttgtatttttagtaaagacagggtttcaccatgttggtcaggctggtctcgaactcctgacctcatgatccaccctccttggcctcccaaaatgctgggattacaggcatgagccaccacacctgcccagaccattctgttctactgaatcatgtgtggtgggcacctcttatatcaatacatatggattttatcttgtgtttgttattggctcccctttttctcattgcatggctacactcaatgctttgtccacacccctgttcctgggttggaatcttgtgacagaaaatgaagtaacaaaggctaaagctttctaaagtggagtcaggagattgcaagacaattgcactttcaccagcaagagctcaaaccacagaatgttccaatagatttggataaacagctgaagtcagtattcaccagccttcaacatctcaactaggagaaccctaaaattaactaagcacatagaatggaatggacttgtgatttaggattccttctcagccaatgagctgcttctgaaaacaactttttgtggaaattacctgtaaagaaaaccctctcctgtgcttgtcttacagaacactagtcagggctgccctgattcagtggacccgaattgctattatttgtttcctaaacatatggtattttctgtgaccttcatctcaatcttttttttaagttactgggctgtttcccagttttcataatgacgagacattctgcagtgtttcatacacatgtcttttccccatgtggagtattgatccaggagctcattcagtcaacgcatgtttatgaagcatcctgtgccaggctgtgggctggtcactgtcttcagcagagagaggacaggcacagtcttgccttcacagagctcacagctcagggaggctcttagaagtgggatactggtcggagcatgtgcacattaaacatgatgaggtcaaggttgctatagggactaaaccacagtcccaccaagatcgcattgagttcctgtggtagaccagaggtcagggcccctaagatgtcctgagcagctccctctgctcagaagttttggttccacaggtgacacacctgagcacaggtgacccctgcagaacctgtgattaccacccaaagccaagagtgagtggtgggtgttctaggaggaaccgtcacctccatgggcagggttggggaagactgaggggagcaggtggctgatgactttggccagaaggtagggggatgggcaggtgtgcgctcatagggaagggaagagaagggagggcattgcaggcaacaacacaaaggttggaacctgccttcatggactgagaaaagcagggagtccacccaggctgcagctggggagggaagacatggggagcagtgggtctaggggagaagcagactgcgattgaccttggggactgggcagtgagcagaggtgtgttatgtgtgtctgtccccatcatagatatgaggaggggtgaggccgcgggtggcacctgggtcggtgggatttcatagtgcctgctgttccctagagcctctctgtatagagggtcagaatagatctgaggctgtggtctgggggaaggggctggtggtgcttaccatctctaggggtgggaggagagggatgaggatgcccctgagcagtgaagcctcaaggtgtgtggagccacagttgtctctcattagacatgtgttttgcgtgaggatgccagggcctggtggttattactgttgtcaagtttgcatgacaaggacccaggtatccagggatccagagcacagggcccctggtgaggggatgaggctcagatggggctgaccaggttcatgtggtcagagtgggagggactgatggagagacagagcctcaacccctcctgtcaggagctgtggctatgtccaggagagatgacaaggatgacccaggacattgagtgagtcattgagacattgaaggtgaggacagggcagagaggaccctggtgactgctgaaatgtaggatgtgaggagggctctgacccatgcaagttacaggacctccccacccccgagcccacagatgacccttaaattgggcatcctgagtgctgtgtgtgcccagcagggacactggataggctggacctgagtctctgtaagggcagcgctggtctgtaggaccagagtcttctctgtgggtgtgacgtgggcaggaattagcaagatgggggtgacaaggcttggcttggaggatctggtacagaagcccatgggcttggtcagctcagcttctcaggggctcagctggggctggaggagcaggatgctgtgctcagggcatgctccaggcagcgtgatgtgtgtggttccagggtcaggcacgggggtcaaaaattaaccatgaaaagttcccaccttctgtaggcagagaaaatggcctgattgtcagggtcagggagacttaccatgtggccaaagcaggctctcagcctcccagagaccacaccctgggtgcagcactcagctctgcagggtatggcaatagatgtgccaagaaccccaacatccagatgcatgcaaaaattttgcgatatataaaatagagcagatcaagtttccctgcaataacgttgttcctggttgtgtctttttcttgtaaactagacatggacatctttccagcagtctgttctcatctgccaccttcctgctgcagcacctcagaatgaacattcctgagacactgtccgtggtgctgacgaccaagagctatggaacagagtgtgatgtagaatcttctagttacctctgctctcctttcacttttaacaacagagcatcattaacaatgagaaggtggagaggtgttcaggatcttgaagtgacttctgtcttgctctcccataaccctgaagctgctgtagacattattgcagaaactgacaccacagtcaggatggccttgtccaggagcccatgtgcagtttgtagtgagcaaggatgagaaaatggtcttgaaaggggtgatggacagaacaggggcttttcaaaaatgtcacatcatcacccccagcatccgtgaatctgtcacatggtaagagaccttacagattaaatgaaggattatgagtttggaagattattgtagtttatccagatgggtccaacataatcacagaatcccttccttacaaatgagagagggaggtgggagagtcagagaaggaggaggagatgtggggatagatgcagaagacagagcggtgtcaagatgctgcactgctggctttgaagatggagaaagaggacacagccaaggatgcaggaggcctctaggaggtggaaaaggagaggaaacgcactctgccctggagcctccagaaagaacgcagccatgtgggcaccttggttcaagtttctgtgtcacttagcttgtgggaatttgtcacagcctcaacaggaacctacagaggagtcaccttgtgtgcaggtgggatccagggtcatttacagctaaatcctgatgtaaatattgcaggttgcttttcctacttcctatctcatggccaacaaccctggacaatggcagaacacccttggaaaccacggctctgtgctttagtggagggaccagcttgtttgtgggaaggtagcacctggtccaagtgaacctacatgagatcgttactctccccagggccctcagggaagggctgagaacagctggcccaggtgtgtggaggagctgcaggtgaggcagggctggaggggcctgtgggtccaggtagaggggcagacaggttgtcccatcgccatgggagcctgcacgagctttaggttggggaaccctgctcctctgacctggacgctcctgtgtggagaggaggcttgctcagtgagatccacgccagggggtaaattgggaactgatgggaaatgaggggctagagtcctgggtagtgcctgggaggaccttgctcaaggactgaattcttggtctgttcccaccttggttactctgacaacccctctctgtgtcccacggggataaagatctcctgagcagtggccattgggacagaggagaacctggtggccagagctaagcatccaggatcctggatttggggacaggcaagctcattgctgggggacagtgatagatacggcctccagggcctgggtgaagagagcaggagggctcaggacactggaggctgtgtggaggtcacacccacgatctgtaccacccatggatgctcctgcattgctcacctttgtgtggacatcagatggccccaacttttgcactcctgagacatctcatgcattcacagagggacccaggctggggctgtgcatggccttggtctctagggtagtgtgaggacagctgagcactcagctggctgggcaggactcctgcgaatcctgccctttcctgtgtagggtccaccccagcctgactcctaaccccctactcctgtctttccagggaagagagactggggttgagataaggtggagatatttttcctgtgtgacccaggagagaatggacatggagtttcaggtgagtttctgctaagttcccatgagcagaaaaagagccaatgagaggaagtttcccctttattcagatcctttccaggtgaccccgggtgggccataggcccattcactttccctgcaagcccccgcttcctgtggtgatgggaagccttcgccttggcccacccagagcccggggcagtctgttgaggtctctatatattcagcagggacccccatcccttcctgtccccaggcctgtgtctcctcaggactcagagctggttctctggctcaggctccatgtccttccccatccccagggctgggggcttcagggacgctccatcaacccacaggagcagctcccagaggaacctaagaagccacatctgctttgtggtcgatccagcagtaaatgtttgtgtcagagtgtagcaattccagtaaaaacagagaagaggtcttgacccctgaggccttctcagaacagggtctggcatctctctctgggcccacccagggctactctgggactgaacctggctgtgctcagggggttcctgctcccaggcccctccctcctctgctcaccacctcctgttattttcactgcagtttcctgaacttcagctcagccagatgccagtggggacagatcctgggtctccctggggcccaagggaccagaatatctgtggcccccactcacctcatagatgagagcagctgccctggtgctgggtaggggaatctgggcaggggagagaggggtgtcaggggacagggaaggattcctgctgtgtaggaattccagggctctcctcaggtgatggagggtcccagggtggggttagcacagggagtggatgatcctggccctgaacagaggcccagctcatggccagggcaggtctaaccttatccaagtcattctgggtagggtgggtttgtgctggggattgacagtccccctgccctgagcctgcacagctggggccccagtggaaatgggattgggaacggacagtcttacctaggagatggagctgtcagagggtccatggcctggggacagagacaaaagtgagcacgagagtgttaggatagctgggcccctcctgcaagagtgtgtgggggtcctcagttcttagagaattggggagagggagcctttctcaggttattttaggggtcaagtaagcaagtgaggttgaggaagtgacccatgacccagagcccggaggttagggctgacccggccagttggggtttcctgtgtgatgttttatgggatcctctttgcagccccagggatagggtcagaggcccctgggtgtaactggcaggagtggacaacttggggctggcttagtagttcccagccacacccagactgaagggacactcaccgggggtggaggctgggggctgctgctccctgaagtcactctgatcgctggccctaggaaaggtcagggttatttgtgaaggtgcaaggttaaaagtcacaaattggagttaaaataggggaccaggaaaggagcctatttccaagaggggtatggagacctcctttctttatggagttctgtggtaggaggggcccaggtgaggggagttgaggaaaggccttacaaagccacatctgtcctggccagaggggaaggactctcaggcagatgctgggccaggagaacattgatccagtgacacaggaaagggactgaggacccagggaaggaatcagaccaccaggggttgcctgagaggaagggtcaaggcaccagggggaaagcagggccaggcacatgtgcaggacactgaggggactgcatgcatcttggattctcctggaactcagtgtccctgctgtgaccagacactccactcagggctggagatgctgaaatgggacaatgatcttgtcttctgtctctgccctttggcaagagacataaacgacattccaggatatgccatattggggccccggttctcccttctcacagctcagtgtctgcagttaccatgtcagtcaaaggggtgctgaccccacccagcccgtccaggctgttccagtctccactatgtgataatgcccaggatcccccctcagatgccctctcactgggtggatggattcagtgaacagggggaggtaccaggtattgagcaccgctcccccctgctccaggcagctgtggctttgctgtgctaggaaactaggaccatgctcaggggcatggccttaattggactgaattcactgaggacaaagctgttgaggaagcagcccagggtcagcagctggtgaggaaggtgccatggaatgagagggaaggatccctggggagtcgggaggctggggagagcctggcactgaatacaagacagggtctccttccttctcgcctggggtcagcgtgaaggatgggagcagaatggggaaaagctgtggtacctgccagtttttcggaggagcaggaaacacacaagtgcagccaccagaagactcccaaccaggaccccgatcaggatgcctagagtgttgtcatctgctgaaagaagaaggcaaaggggatgaggtccaaatctgttccagggggaaccatgaggggccttgcagggcaggggcatggtcagggaggaaggaaatgccatggagcctgagtgtggtctgttgtgctgtcctcatagctggctcccttgctctccgtggttgcaccattttctgtgtcttaggcttgaattactgggatgcatcaactcctacattctcccacaggaagcctgcacctcatcctgctcctgtgttttttagtccctccttcctctcacatcactcctcttccccctgtttctttttttccatcccatggcagtcgtaaagggcaggcccttgctgccaactcaatgctgatgagcagggatgatgttcattgactgttttcaggggccttccacatggaaggcacagtgggaatcaatctacctgcagcttttctcaccctcccattgccttgagggagaagggtatgtgatattgtgaaatacgtatttggtgttcatcaccattgatatggttaggctctgtatccccacccaaatctcaccttgaattgtaataatccccatgtgttatgggagggaccttgtgggaggtaattgaatcatgagggtgggttttttccatcctgttcttgtgatagtgaataagtctcaggagatcagatggtttcataaagggaagcttccctacacatgtcctcttgcctgctgccatgtaagacatgcctttcaccttccatcatgattgtgagacctctccagccatgtggaattgtgaatcaattaaacctctttcttcatacattaccaagtctcaggtatgtcttcattagcagtgtgagaatggactaatacagtaaattggtaccagctagtggagtgctgctataaagatacctgaaaatgtggaagtgactttggaactgggtaacaggcagaggttggaacagtttggagggctcagaagaagacacaggaaaaaagtttgaaacttcctagagacttgttgaatggttttgattaaaacgctgatagtgatatggacaataaagtccaagctgaggtggtctcagacagagatgaggaacttcttgggaactggaacaaaggtgactcttgttatactctagaaaagagattggtggtattttgcccctgccctagagatctgcagaactttgaacttgagggaaatgatttagggcaactggtggaaaaaaaattctaagcagcaaagtgttcaagatgtgacttgggtactgttaaaaacactcagttttatgtatttacaaaggtatggtttggaattggaacttatgtttaaaagggaagcagagcataaaagtttggaaaatttgcagcctgatgatgcaatagaaaagaaaaatccattttctgaggagaaattcaagccagctgcagaaatgtgcataaacaatgaagagcaaaatgttaatccccaagacaatggcaaaaatgtctccagggcatgtcagagaccttcctggaagccccttccatcacaggactggaggcctaggaggaaaaaatgtttcctgggccaggcccagggctcccctgctgtgtgcggcctagagacttggtgccctgcatcccagccactccagccatggctaaagagggccaaggtacagctggggccatggcttcagagggtgcaagccccaaaccttggcagcttccatgtggtgttgagcctgcaggtgcacagaagtcaaggattgaggtttgggaaccttcgcctagatttcagaggatgtatgaaaatgcttggatgtccaggtgaaagtttgctgcagaagcagagccctcatggagaacctctgctagggaagtgttgaagggaaatgtggggttggaaccccgacacagagtccctactggggcactgcctaatggagctgtgagaagaagaccacaatcctccagaccccagaatggtagatccactaacagcttgcaccatgcacctagaaaagctgcagacactcaacgccagcctatgaaagcagccaggagtggggctgtaccctgcaaagccacaggggtggagcccaaggctatgggagttcagctcttgcatcagtgtgacctggatgtgagacatggatacaaaggagatcatttcagagcattaagatttggctgccctgctggattttgggcttgcatggggcctgtagcccctttgttttggccagtttctcccatttggaatgggtgtatttacccagtgcctgtacacccattatatctaggaagtaactaagcttgcttttgattttacaggcttataggtggaagggacttgccttgtctcagatgaaactttggacttggacttttgggttaatgctggaatgagttaagactttggggaactgttggaaggcatgattagttttgaaatgtgaggacatgagatttgggaggggtcgggtggaatgacatggtttggctcttcttcacccaaatatcaccttgaattttaataatccccacgtgttgggggaaggacccagtgggaggtaactgaatcatgggggtggattcttcccatgctgttctcatgatagtgaataagtctcacaagatctgatggttttagaaaggggagttcctctacacatgccctcttgcctgccgccatgtaagacatgccttttgccttctgccatgatttcaaggcctccccagctatgtggaactgtaagtcaattaaacctcatttttaaaaaaattacccagtctcaggtatgtctttatcagcagccaagaccagctcggtcgcggagatcctaacccagcagtgctagaggaattaaagacacacatagaaatatagaggtgtgaagtgggaaatcagggttctcacaggcttcagagctgagagccccaaacagagatttacccacatatttaataacagcaaaccagtcattagcattgtttctatagatattaaattaactaaaagtatcccttatgggaaaccaagggatgggccgaattaaaggaataggttgggctagttaactgcaacaggaacacgcccttaagatgcagattgctcatgctattgtttgtggcttaagaacgcctttaagcggttttccaccctgggtgggacaggtattccttgccctcattcctgtaaacccataaccttccagcttgggcattagggccattatgaacatgttacagtgctgcagagattttgtttatgaccagttttggggccagtttatggccagattttggggggcttgctcccaacagactaatacacccattttctggtatgtgactctaaagtccttagaatcttcaaagtgatgtctttttcaagctaataattgactgatgactggcagcccctaggcaacttcagaatgaggctggtcactgacccaggtaggattagagggttgggactttcagcctcacccctaatccctggggagggacctggagtttgaattaatcaccaatgaccaatgaatcaattaatggccaatgattgaatcaattaatggccaatgattaaatcaatcatatctatgtcatgaaccccaaaaggactgggtttgaagagctgaacccatggaagtttctggagtgtggtgcatctggggagggcatggaagctccacaccccttcccacatgccatgctctgtgcatctcttcatctgcatcctttgtaaagtcctttattacaaaccggtaagcctaagtatgtgtttccctgagtcctgagagctgtttgagcaaactaatccaacccaaacagggagtcatggaaacctcaatgtgaagccagtcataagaagctctggaggcccagacttgtgactggtgggaaggtggtggcaattttgtgggactgagccctctgctgatatgtccaggtagatagtgtcaggatggaattggaggacacctagctgatgtacggtgcagaactgattggctgctgggtgtgtgggagaaacccccccgcatcacatttggtcacagaagtgtgtctgtgttgatgattgttattgtggagtgagagcagaggaaaaacacagtttgagtttttccaaacagggtggaatcccatctgccaatttagaatctgaaacttatagtttcagtacttcaattaagattgaagtacttcaattcagtacttcaattaagattcagtacttcaattaagattcagtacttcaattaagattacagaactggtaagtgaaagtgatacaacaaaaatgtaaccaaagtctgctcaacttaacagctaataacaacaaagttcataaaaataataccagtcgatattgatagcactgattgagccctggctctgtgcatgaccttgttaagggctttaatcgcattaatctctgaataaatatcctcacaaccaccctgagatccaggtgtttgtaacaattctacagatgaggaaactgaggcccaggaggttgagtgtcttgcccaaggtcaaatacctggtacctattgtaaccaggatgataactggatgagtctaatccctgagttcttacccacattgctccccaggctctgaaggaatctcatccttctcattccgtgtatcattttacaccccccctccctcctaggaaaatatacaaggaaaggagtgagaggggccgagggtcactcacattttacagtcagcttgagggggtcgctcctgttggagctgactgggttggagacctcacactgatactccccagcgtcctcctgcctgatggggtctatggtgagcatatggttaaaccaggacagcttcatcctcttcgtgacctgcagacgctggttgttgaaaatccactggaaagaggttccagtgttatttgtgtggcaggtcaggaccacggagcccttctctgtgactgtggtgctgctggcttggatggagggctgagccactgactctgtggatagagtgaccaacagaaagtgtcttggggccatgctgcatcctcagagatctcagagtcaaatttagaacattctcctgtgaataaaggagaaagatgaaggacagggaggagcagagagaaccagagacacccatagcagcgagcagtagggactacagtgacctcagagaccccagggaccaggaggacccagctgcctcagaccaggaccagggagccctgaaaaccctcccacagatgagcggccccagagtcacatgagatgcaatacctggggtggctttaggagcaggcagtcagagaaatggaacatgggtctcagcccctaagggacaaggaagaggtgtggccagctcctcctaggatcctacatccaggacccagtctgtaaagaggttatgattattcctttcttttttcattaattccctccctccttcatcagagaactactgagtgtgtgtctcagttgggccttgtgcaggtacagggtgtagtgggaagagaaagctgagtcctttccttcatcctcccatgggagtgacatcaacaaatcaagaaattcatgatttcacgtccagtgagggaagaaatgtggatctgatgggagaggcttggacaatcctggcattgagtctgatagttgagacaggtgatttcgttctaagtaaaaactgactaattctccatttgcccgtcattcctcagaccagaatctccctctctgagctgaggatgcccaagaagaaaggagctgaaccaacatctggtcctggggtccacagatgccccacggtggtggccacgaccagattctgggctgcagacacacggtggtgtgacgttgagcactgacagcctgtgtgatgctgatgcaatttctctttaataaaatggggtaaatgtcaatggtccctggcttgccatcctctctgtaaattaacattaaaatatttacaattacctgacctaaagcttggcacagaatagctccaaataaacatcatctattattattttactccaaaaaaaaaaaaaaaagagttctctgggcctgattcctggtggagaaggagcggtccagagtgtcttttctctgctttccctcctcctgaggacagtgcacttcccgggacatcttttaagtttcccatccagtttaatggcctgggaagtttgtttgtctgtcctctccactctgactctcaggtgaaagatgaggctctgcccttgcccagatggggctctgggggctgagccctgcctggtgaccagctctaggaaccacggccctgggacagctggtaaatcgttgctcacaatcagccctgcccaggaagccacaacccagccctggcacaggctccccagggtcatctggagtcaggatcttgggacaggggcctggggcaggggcttgaagggctgagcttctctcagaggatcctcaggccaggccctgactgagtcctataagatctttctcaggtcatgtctatgaggaggaggccaagcggggttggactgagactgattttcccccgctgcatctcccgcatcagactatccttcttgctgtagggaatttccacggagtccggataagggaaaggaattctgatctgttatagtttgtctcccctgggtgtgtcctgcactaaatgcccaaaccccaacatgggacgtaatgcagagggggatgcaggcacagcccaggcctgacaatcctgcgtatgtgaagcagaactgacccccaacacccagaggcacggaggaatcactcaccgtatacacggagatggtgagatgcctgttcaatctgagaatttctgtatgtgacttgtagggtgtagtatcccgtgtcctctagggtgacgttctggaaatgcagatctccactgggtgatattgtctctcgaccgctgtatgcaggccctggagtcctaacgtgagtgtctattacatatgctgcgattagctggttgggctccaccgttttccctttgtaccagccatagctgtaaagattctcgggcagataaaccacagagagatgaacattctccccttcagcaacttcaaagggcgctgatgcaataaagagccaggcagtggtgggtgcgttccagaaagttaaaagtgaggctaggaaagggagagaatatcagtcaatatttgacctatgcattggcatggaaagacggggtcctgggtgcaggtctcttcacccctcagccttagagggtgtgtgtgtgtgtgtgtgtcctactgggtcaaagtcagcagcatgaccctcattccttcagtacctctgaccttggcatttccttgtgtgaaccctctttcccaggggtctgcatggttccctccccactgccttcagttcctactcacacaagggaatccctgggagacttctttcgtgaagcctcctctagagaccctgggtcttccctttctgacctttcccagctctgttccctccagggctcttgtcagcacctgacctcacattctagatctctttgggtgtctgtcttcccccccatgagattgtgagctctgtgagggcatggacttgagtgatgttagttgcaccccagtgcctgggacaggctgcagactcctgtggatgagttcatgagcgttcccagggccttccatatcctggggtttatttgctaatgtctgaggttggcagatgaagacagagtttcatgccctggtggtgtttttatttaaattgtcactgtgatatagttttactatcattttcaaaatgtagtggccactgacaatgaacttgaaaacatggaccaactgagattgttttgccccttggcaattccagttcacttagattttttggttctccttagacgctctctcccctgagtctctaacaaaagccctctgtctcctctcagagccccatcctccccaggagaccccagccagtctctgtgctccctcctcccacccactcccagggagtcctcccctcacctgtgagcaagagcccctgccaggggatgcattctctgtggggacaagctgaggggggccccatggtctctgctgcctgctctgtcctcctctgtggagaggagcttgggctccaggaacgctctagacagggttactgtgactgttgtctctgctgtccttccttcctctatgctgagcttcctctcaggcaggagcacttcccgtttatgggcaagggcggggctctgcctacaatgtctctctgtcccctcccctctcagtcctgcctcccttgtccctcctttctccttcctttttgcctatatttggttccctaggcaaaactttgagaagcaacgctgatggggtcctcataacaggacgacccactctccccagtactgacctctgctgtgttctggccttggttctgtcacagccggtagattatttccctttgtgacacacaaaaccagctgggccctgggtctcctcatgctctccagtgctccaggaaggcagaatgatgcccagcaggaaagtgacagaggtggctctgggggctagaaaggggctcactgggtgatggctgggaaggacccacccgctatcttcagtgtcaccagcctggcctctgacccagggacagagacccaggcctggaggtctcgggaggatccccagctcctaggtgtggagggaggtgtcctgtgtgtcctgggaagagaggactttgatggaaggaggtgggaggctctgggttctgctgtccttggtgaaggtttcagggggaccctctccatgtctggggtctgtgcccccagcttaactctcattctctttgcaaatacatatattttgtggatctgcagttgcctgaactgtctcatgtccctaaatctttgtatccctttttacagaaggtcaggaagggtgtgtacatgagtatgaggactatctgatcagggcgagtgtttgtttcccaaagatctctttagatatggtataatacataagataaatgtactgaattagcaattttaagtgtagaattaaatgatactaattctattcacaatgttgtacaaccatcaccataattttttaccagaaaatcttcattataccaaatggaaacttcatacttttaatcaataactccccacttccccctgccccacccactggtagcctctgatactatcaatctctgtgaatttgcctagtttacatgtctcatataataaggaattatatacgtgtattatttttttctggattatttctcttagggtaacacttttaagattcatccacgtcgtagcatatattacagcttctttcctatttatggctgagtaatatcccaatatatgtttatacctcaattttaattcattcatctcttaatggacatgtgggtggtttccacatttttgctattgtgaaaaccgctgcaatgaacttacacttggaagtatctgtttgggtttctgtgttcatttctttgggggtacatataggagtataaatatggggtcatgtggtagttctatgtttaagtttttgagaaacagccaaactgttttccagtttgctgtgctattttatattcccatcagcaatatacgagggttccattttctctacattcttgtaaacacttactatttaatattttttaaaacttatagccattctagtaggtgtgaagtgatagctcattgcagttttgattttcatttccctggtggctgatgaagttgagcattttttcatgtatttactgacaattttaatattttttagagaactatttattcaaatcatttgctgtttaaaaaaaatgggttatctttttattattcagttgtaatagttctttatatattttagatacaagtcccttatggggtacatgatttgcaaaatttttctcatattctgtgtcttctcactttcttcatggtgttctttgaagcacaaacatttttaactttgatgaagttcacttatctatttttaattttgttacttatgctcttgatgtcatattgaagaaaccattgcccaatccaagatcattaagttttactcctatatgttcttctaatggtttgataagttttgctattccatttaggtttttgaaacattttgagttaacttttgtatgggctgtgaggtaggggtctaactacactatctcgcatgtggttatccagttgttccagcacaatatgaagaggctaccattctttccccattgaggaatcttggcacccatgtcaaaaaccaatgggctgtaatggtgagggtttatttctggactcttgattctattccattgatctctatgtgcattcttgtgccagaagcacactgttttaatgattgtagtgttttagtaagttttcaaattaggaagtgagtcctccaatttttttttccagattgttttggccattctggggtgacttttaaaaaagatgtagttcaatggttctcaaagcaggagtggttcagctctccttttttggcagtctggagacctttttaggaccttaatctaagtagataaattattcccactttcttttctgagttgctatgttacagtgtatattgacacccatgaaataattgagagaccctggaagtgcttgcctacatagtgagggacaattagttccatgatcatgggcacagaagattttgttttgggaaacaattttgttggtggagttatattcatgcttactcttttatttgtcttcatagcctgcatctccttcagacttcatatctgtttattttcttgtttgtcctctggggtttgggtgttgggtgaccagtcagctggagctggaggaggtgcttagcaaggcagtgaccctggttgggaggagcagggctcagcagggtgaaagtagctgggccttgagtcaggagtggcatctggaaggcctgactgtaagggtcagaagggccagcaggtgggtgtcctaggcacaaacggtggctgctgctgtggactggaggaaggtaagaggccccgagtattccatgttcttactggctccccaactgaggattcctctcctgggctggtgctgtcctgcagcagggaggggttagacagggacggctgcacatcaggccggagtccatgtcatcctcttaggcactgtcactacagattgaggattctgttcataagccaagcctttgcacaaggaagggacccgggctctcaaggaagagcagctcctggtcagacctccatctccttctctctcattgcctgaggcctcaagcttggtctacctggcacaggggtctggatcctcctcccagggttggggtcttactgagctgggcacctgcaggtgggagaagatctggaggggccccatctgccttcaccagattgatgttgagggtccctgagtcctgcaccactatcaggtgctgagcaacttccagtgtcagtgacaaccaccccatggtggaagcagaaccacctcgtgagaaagcacctccaagcctcagtgcttgccatgtgtgggaatttgctggtttcagttgggggcatgttggtgggtggtcatgaattcagggccggattctatgctcacagtgcacatgctggatgtggtacagaccccaggcagggctcagtggggtggttttgggtgtgcacaggtatcttttctggaggagctggtggtgatttggctcccagaagttcctgagctctgcagactcaccaagcactcaatatttgagtgaacattgggcgagagagcagaaggtaagtgtcagggcatcggggttggtgcctctgggaagaggaggaacattctgggaacaaagctctcccccggcttacagggagcttcccatcgctcctgccttgaggatcagggaaactagggcctctgctcttccaggggctgcttgcaggcagtttgctctgggagggggtgacccaggagttgcctctcattttgcatttgagatttaaaaggagaagggacagtatatcttgccaggtcacaaaaattacaggcatcatattgactgaagggcactcctgtcatcactgcaatataccagaatggtcttttaaaaaaataagtgatttaggtttaccagcaactgtaatgcttgttttattcttctagttcaccgttaatgtcacttttgtagttttagcactggcaatgttgattttatgttgactctgatgattttaagctttcatttgttcacatagagatcatcttctttctgaatattaatgcattttttctctatttctactggttattcctgtacatagagtagagaatcacttttcccaaggaggtggaaagcttctgactaccaaaaaaaaaaaaaagtgtcaaaatgctttaaagtcagtaacttaaagatcaaatccaagagtgggcaacagattctgcccagggtctgaaaggtggagaggtgactggtgaggatgtttaaaagacctctcctctctactccctaaatgggggccatccagtgttcttgaggttcagagaaggcccagggctggggcagcagggcactgtcagctcccagctcccaggggccaggagtaagaccccaacactgtccagacactgattgcattcattttgggggagagtagattcttatttaaagaataatacaaaagtctacaaatatgaacataaacagaaattcctttgctacaattttccccttaataagacattccttcctaatgacatatgtgactgcattcatggctgagatgttttctaggatggtgagagcatcagagtggactatctggtgccttggggtcatgcattttcttcttccaatgtctacaggatcccccatgtcccactttgtagtgtaactcagtgtgtgtcattctggtttttgttgtatagatccttggaaagcccatgtcattcctgctgtgaggtacaggcagccaaatggcatcatctctaaacatgccttctcctggtacatcaaattatggaataaatgaaagccattttgacagatattgaagatataagtttctactcttcccacacatgcttctcccaagtgaaggattttactggtgaattgttattagagattagtgtggatcagtgactctgccaggggaaattttgccctctaggggacatttggcaaagtctggaaacattgttggttgtcagagctgggggagggagtcctgctggcattgagtgggtggatggtgctgaacaccctgcagttcacagagccccaccagtttgaccacccaaatgtcaatgctgaggagtggagagccctgctgtgccctcccgcagcttccctgaagcttcccctcacctgctcctcccatgtctccccaccacttccccacttcacccgcctccttacacctcagtcccctccacctgaactcaccccttagtccaaggccagccctgatctccgctctcctggtctccttgctccttagcaggaggcgcccactagatggcgcccttgcccttactggagctcaccgtctccctttccaccctgagacaaatgtggctgcttttactgccacaaccccagccctccacactctagatttgctcagggagcagctcctggacagacctcagggaccccagggaggagcctcactctggagattttgatggcatggtctttgaacttcactgttacccccagtcaggatccaggatgttgggagtgcatgattctgcccggtcccacttcagcaggaccccactgctgagttgtctgtggggacccgggcctctcatctccttcttgcattgcaggagagggatcttagcactgctttcacataaagtcagataatggaggagtgcaggtgagtttgggaaggtggacatgaagagaggttgtgtccctagaggtggcagcagtgagaggatgggcaggtgggaggaacacagcccatccagggttgccagccatattaggagcgacagcctttcctctaagcctccagcctttttcctgaaacattccagaactttccacttcagcacttcccactgaggctcctcaggtctgtccctgagctcccagctgagcctacctacccatctgaaatcctgagtcctgtgtcaccctcgttccccattattctgtgcagttctgtgggacgcccagctctcctgacacccccagtcttcagaatggccatcagcgctgtcgctgtggcaccagggtgactgccgcctggaggctgagtcctggcttcctgacagctgtggggcccgctctaggctcccttgtcctgatcattcatcacctccaggatgcacagcagctgggccagggggaggagcagggacaggtgtcagccaccctgtgtgtctgcaagtcaggctgggggtgtgggaggacgccaggaatgactgaactttctgatttagagggtgagagcttgcactgatggaatttgggatttaataggaaaagcatagcgttttcctattttgtaggcagggtggctggagtttggaatcatagattcccctgggatgtcactgtggacctcagtcccacccgttaggggcacagatttcagaatccacaccctggggcaaagcaggcatgggaggctccatcagcctggccagggctctctatttgtgcagctgctgcaaggagatgtgcactctgatgggaacagtgctccctcctccttggggggcagtatctagctccctgcagcccctctccctgcaggccctgccctctctgaacctcaccttccccaacccgccccccgcaatcccatctcagctgtaatcccaacactttctcatccattatgggtggactgcttgagcccaggggttcaagactatgctggctggacaatatagcgagttgttgtctctacaaaaagacaaaaattagctgtgcatggtggcatacacctgtagtcccagtcactcaggaggctgaggtgggaggattgcttgagctggggaggctgagttggcagtgagttgagattgtgccactgtatacttcagtgtaggtaacagagcgagaccctgtctcaaaaaataaaagtaaaaaaaaaaaaagaaatatggaatacattattgttaactctaatcaaccatgctatgcaatagtccaccagtaataccagtaatagccaataatgaattatctgaaaaagaatacaatttattcttagctatctactgctaaaatttttaagctatcttttatgatagctgaaacaaaagaagtaaatttaaccaaggaagtaaaagacctttataatgaaaactgtaaaacattgatgaaataaattgaaaaagacacacgcacaaatagaagatattccatgttcatgaattggaagaactgatattgctaaaatgtccttaccacccaaagtggtctacagattcaatgcaatttctgtcaaaacaccaatgatattcttcgaagaagtagaagatcctaaaattagaaaccacaaaaattcctaaaacctgcacaaaacaccctgagttgccaaagcaatcttaaacaaatagaacaaagctagtggcattacacttcctgacaatcaaagcatactgcaaagctatagtaaccaaatcagcatggtcctggcataaaaacaagcacatagatcaatgaaacagaataaaaatcccagaaataaacccatgcatctctagctaactgattttcagccaaggagccacatgcacacaatggggaaaggacagcctcttcaataagtggtgctggggaattggatattcatatgcagaagaatgaacctagaccctatccctcaccatgcacaaaaaattaactcaaaatgtattaaataaagacttaaatgtaagaactgaaactatgaaactactagaagaaaatatagggggaaaatccatgacattggtctaggcaaagagtttttggataaaatctcaacagcataagcaacaaaaccaaatataaacaaacgggatttcatcaaactaaaaagcttttatacagcaaagaaaaaaaaggccagcagagcaaagagacaacctacaaatgggaggagaatatatttgtaaatatatacatatatatttgtaaatatatacatctgataagaagataatatccaaaatatataagaaaattatgtttctgtatagttttatctgactgggatacagaggccacatccacagtcccatcctcaaaggccacttgttcccaaaatgtcaagcacatccctcaatgatccatcatcaacacctatgtctgtaggatgaagggtgaatcatgaagcactaaaaaggaagaaggaagccaatcccaaaacaaaatgatgcagggtctggaaagtccaaagcattttttttttttttttactgcatcttcctcctttcttctccacattcccaatcctcactattgattaacaaaacaaaaaaaactgggacccaccatcttccctactgtcaggagatctagcgagattgtttgagtcttagaccaaactttgccataagccaaatttctggctgactttacaatgatatgagctagcacagtctctttttctgccagtcaacttgtgctcggttttatttgcaaccaaatagaggtggtaaccaaatataggtgaccctaaaattagtcatcaggatgaaatcctaaaatgtgcaacaaactgggttgaattcaggattagtagcaacatctctgttgtgggcttgaaaagggggcacccttttatgcagtagcaaaattgctaaattgttgtttgctgagtctttggactctcatcccggattttctatgaccattcaaacagggctgcaatgaacatctatggttgtttagcttggcacacttctacatttctatatagtaatatctagaagtgcatttgctcaatcacaagatatgcacattttataattgactgctatcgaactaccttaaatagccttaatttgttctcaacattgtttaacagggtctgtttaatgtcctacgtccagcaaggacagtatcacttttcttaatatttttcaaattattggaccttaacaaatacttaatgtgcaattaattgattcctttgtattcccatgccttcttttatatgtttccttatagtacacaaaaccacattattgtttctttacttgtgtcattccaccctggaccattcctatctaaactataacattatgagagagagagagagagaaaacaatatgaaaatataaattgattaatcaaaaaaatttaaataggacaaatcaggaagacacaagagagattttaaaattattcagagaataccacaatagctgtaccaatatattttaaaacttagatgaaacggacaactatctcgataaatgtaaattaccaaaactgactcatgaaaaaatggatattatgaatagagcaataatcagtaaagcaattaaaaagacagttgataatttttatttactgacaacaataacaaaatttcaggtcctgatatttttatggtgaattttaacaaattttcaagctcctcctcaaccaattctcagaaggtttaaaactttaacaagaaaacactttctaacacattttcagaagctgttatagcatgataccaaaaccacacaagaaaattatagaccaatctcacttacaaatatacatgcaaaatcaaacaaaatcttagtgaaccaaattcagaattaataatagcaaacaagcaaaatatgttatcatacgtatggcttatatcaggaatgcaagtatgtttcaacatcagaaaatacttctccacattaacagactaaaggagaaaaacgcttgtttaattatctcaataggtttttagagaattttgaaaattttataaagttatgcgtattctgtaaaattgatgaaatccaaccttgatttatttttaaaaattgcctttcctatagaattataggtaaaggaaacacatgcatcctcacagagctacttcaaggctaagttacttcccataagtaacgtatcctgtaatgtgtgcttggcacatattcaatactaaacaaatatttgcaaatcctcaaaccacttctcgctcaaataacccacctttgtcttttgcctttatgttagggttgattttctcaattgtatcttggagatcctttggtgggtctttcagcaattaccctgaatttgcttttctgtttacaattttaattcctgggaactctttcttgttctctgactgcacccttttcatgagagttcagccatcaatcctccagaaccccaccccccccgcccccccaaaaagcaataaagatgtctaaaagcttccttctgggctttcgaatgatgtttaccccaggcatttgttctattcgttcatcacccattttccctacaacttgcctacacttgatatcagatttttatttattagtcacctatcttcttcattggcccattttcctattttgccactggttgttctcaaatgtgttatgattcctggttgtacagtcaagtggttgataatcttggatatacgataaagatttgctctgtagctgtgtgtaagcctatataaaagcttttgtatttttcttcttaaaaaagacaaaagatggttgggaagatccctccagttcaccagttcgaggctgcagtgagctatgatagcgccgctgctctagcctgtctgtctgtgaaaaacaaggggggcggggggcgggggggaagactggagatgtaaatctcccgcagggccctacccgtatccgcaacaggtctctaacaggaacagcctcaggcctgtgttggaacaaggtaggttacagaaatctggaagccagatctgtaacttcagggtaaggactggctctcagggctgatcccccgggctgggtgtcccagaggcacccgcccccgccccttccccaaggcaggccaggacaccttcactcctctccttaggctccccacccccttctcctccccactgtgcctcctggagtagcggtggcggtgccacaggggagcggggcggggcgggctctgagggcaagggggatgggccccgccggggtcactggcggccaccctggaaactcgacgcaggccggcccttctagtgaatcgtcccagccacagctggcctcccagccgcgcttggggcgcctcggggcgcgaatggtgcaggttggggagactcaccacgcaccgtcgggggtcggtccggttattcctcaccgctcggctccagtgggcgcgcgggcctctcctcctcagttcctgcgctgcagtccctccctcacccttcgcagcttgggaatccaactgtgtcattccgacggagcgccgtgaggacctccgagggtgttagcgccaagtgatctctgtccagcgctctgaatatccaagtaaaggagttcaatgaagggcgggtcaacggaggagaaaccgtgactctctcaagggagcccaaggcctccttgtctaattagtgacgcgccaatggatggaggctcttcccaccatctcttcccagcatccagtgacaccaccgccaagggacgggctcggcggaacctgcaggaaagaagcatcggctgagcctgactgcagcgctgtgaagagacaggggaggggatcagtagttggtcccgcgcccaccccctgtttccgcgaggggcggagttgactggccatgcaggcagagggcgaaatgtgaaattccactactcctaccgtttttccctgacccgatggggcggagtgtcgtcaggctaagttccctggcggtaaggtggggagattgaggcgcacacctgccgaacggtaacgcaggattagctaaggcgagctcaggacagaagcctcccgaggagcaggagggcaaaataataaataaataaataaataataaataactcactccttggtctttatttgcggcaggaattcagaaggtgaaagcggggccttaggatctttctgaccttttgggttttaagcaggaggtgtcagaaatgttaccacagggctagctggcttgtggccagcaagcgttcacaatgccctcgatttttcatccctctctgtgggttctttttttcattgtaaggcagaatttctacgattgctcacccactcagagaacctgagctggtttagaccaggtgagacaggctaggtttaccctggtgatgatgtgttgttgccatggcgatcctgcccagtaccagaggccctgcagattcagatgcttggtgcctgtgcttggctgaggggccaatgggtgaagctgccatctgcgggatgatgactgaagcctctaagtcagaatccgcccaggctgagccttagggcagctccatggagcctcggctggcctgggatagagagtccaccactgtgccagcccccagccactgcctaggtcctgtgctgagagccccttgtccagggaaatggcgtccagtggaaaagggaccacccccttgcccttcactcaaggcaggttggtgacaaccctgaagctaatccgttcctagaggagctgcttctgggtccgagttttctctgcagcagagcagctccctggatgggatctgttcaaagtccgcctttcacgcggaattttccgtccttgcaattttccacctccaccactaggggatcctctctgaccgcctcatgccggctctggcctctgagcaggggtttctcttctgcatgtgcgaccttgcgcatgcctagtggccttttgggacctagagctgctccacaccccgatggggttacagagtgcctcgcctccactccaccccaccagggttccttccctggctgggatgggatttcagaagcgccgaggaacagcccagacaggtgtgggagagtagccaaggcccctgtcccggggtggccaggacagcggtggcctcgcataggacctggctgggctgctgcaatcagtgtcctgccccttggagagcaacagtgaaaacaacaagactatcttcacccaccttaagaaagaacagaaccagtatccccaactctgctgtgtatcccaacccaattccattccccaccccactctcagtagccaatatgcaaaatattagaatactcttactgttattattttcaaccacactctgcatcctgaaaaaccatatatttcgttatgtgcttttaaacttcttgaaaatgaaatactgaggctgggcgcagtggctgacacctgtaatcccagcacttcgggaggcggaggcaggcggatcacgaggtcaggagatcgagaccatcctggctaacacagtgaaaccccatctctactaaaaatacaaaaaattagccgggcgtggtggcgggcgcctgtagtcccagctacttgggaggctgaggcaggagaacggcgtgaacccgggaggtggagcttgcactgagccgagatcgcgccactgcactccagcctgggcgacagcgccagactctgtctccaaaaaaaaaaagaaaaaagaaatactgaattttcaaatacttgctttttttttcggtcaaaattatgttctcaaatttcactcctgtagatgtgcgtggctggctgtagtttttgcatttttattattaggtattctcctgttgcattaatatgccacattttatttctctcatgtttttggtgaccacttggggtgttttttggttttgtatttttgctgtatacatgctgccatggtggacatacctctttatacatatttcctgttgtatgcagacacaattttaggatgtgacatcttcagcttttctattgtgtcgtgtgtcttttccttcgtgctttgtgttatttacatattctggacacagattctttgtcaactgtatgtgctgcacatctctttcccagtttgtgtcttcttcttcttttttttttcttaaaaaaaactttctttatagtgttttttttttctttctttctttgttttgttttgtttttttgagatggagtcttgctctgtcacctaggctgaagtgcactggccgatctcggctcactgcaacctccgtctcctgggttcaagtgattctcctgcctcagcttcccaagtagctgggattacaggtgcctgtcaccacacccagctaatttttgtatttttagtacagatggggtttcaccatgtttgtcaggctggtctcgaactcctgacctcaggtgatccaccctctttggcctcccaaagtgttgggattacaggcgtgagccacagcacctggcctgtgttctttcttaagtagatgttacttttaatataatagaatgtatcatattttgcttttatattagtactttttctatctaattcaaacacatccccaagggtctttgtgtgtagactgaccaatttctcaagaatcatgaatgaatactgcttctctttccccaatttatctgtaatgctacctttattataaagtttctatgcatgtgtagaaatagttcctgatttttcactctgtgccaccagcataccaatagcacgctgtcttaaatattaaatagcagagctttatgagacaacttgatgtgcagtaggcaattgcccccttgttactcttcttcagggttctttgttgtaccacatgaattttagaattggcttgtccagctaaaagacaactgcaaggattttatttggaagttcataattctatacataatttggggaaagtattttcataataccaagtcttcctattaatgaacacagactctctctctctctcccccacccccacctgtttagttatttatatctttatggtctgttagttattgtttattgtctttcaaccaggtttcatgtttttctacatagaggccttgcatgtgaaagtctttcttcctagcttgctattacaaattttttttaattgcactttttgggtacagtggcttgtactgtaatccccgatacctgggaggctgaggcagatggattgcttgagtccagaagttcaagaccagcctgggcaacataatgaggtccctgtctcaaaaagtttgttttaaaaattgcatttgctgttattcaacaaatgtcattgtgtctcatatatggatttttatatctgataaccttgttcaacaatcttttgattctaacaatatatcagattcttttgagttttccatatagacaataatgtcatctgtaaattataattgtttcttctttgttatttcttggaccttttattttatatttttgtcttgctgcaaggcaatatccctctatatattgtggggtcttttttctcataaagtggggatggtgaacacccttgtcttgctctctgattgtataaagcatgctttctgtagcattttgtagacgctcttttttagattgaggtaattcacttttatttctggtttactgagtttttagcataaattcaggctgaatttgagctaaagctttttctggagacatcatttgaaaaattcatatgatttactttctttaagtcaccaaagttatgatttacattgaactgagtttctactgtttaactgtattcttgggagaaaacccacttgtcactgaacaatatctgttttatttactgctgtcttgtgtctaaattttcttttaggattttttgtatatgctcagattagcctgttattctcctttctgtatttttttctggtttgggggtcaaagttataatagcctcacaataagagctaagaaaccagccctaatggaggccggggcaggaggtttggagttcaagaccagtctgggcaaaatagtgagacccccatctctatgaaaaatagaaattagccaggcatggcagtgagtacctgtagtcctaggtacttgggagggtgaggcaggaggattgcttgagcctaggaatttgaggctgcagcgaactatgattgtgccactgtactccagcctggatgacagagcgagaccctgtctcaaaagaaaaaaaaagaagaaataaaaaggaaaagataaaagagctaagcatctgtttccttttttccattttctgggagagtatgtgtaagactgtaattaactgtttcttgaataatgggagaactctgtaaaataatctggctttggtgttacctgtattggaaggatgaaaaataccaattcagtttcattattggttgatagggctactcatgctttttgttttgttttgttttgttttgtttttgagaggaagtctctctgtattgccctgttgtccaggctgagatgcaacgttgttcacaggcctgatcctggctcactacagcttctaacttccgatctcaatagatcctcccgcctcagccttcccagtagctaggactacaagcatgcagcatcacatccagcctcttttcctgcctgacccagttctggtttcctttagttttctaggtgttcatccattttatctaatgtttaatgcatttggcataagggtgctcagtgtcctttcattgtctgttgtctgtaactgttgccattttcattcctatttatgagtactggcgtcttctctcactttttcttaataatcctgctggaactttgctttttaaagaacatcttttgacttgttgattcttttttcatacatattaactattttcttattttttgcctttatatttatttcttttcctgtttgaaacattgctcttttcttactataaaaatgggtaagtagctcatgaattaccacctcttttaaaaatcttttctactgtaagcattttagcagtttacatttgcccacaagtaccacttcagctacaccctatgtgcttttacataaagtcttcatttttggtaagacatattctcaaattttaattatcacttgtttttaaatccatgatgttttatttgaaatgttgtttctaaagatacattttctggttatacttttattcttctaatttagcacagtggccacaaaacatggtctgtgcagtgcatacaatcgatgagtaatttctgagctgtagtatttggcataatatatggcaaaatttcctaagttttccatgtgtgctttaaaaaacttccagtaaaatacataaatctgttagatcaagcttctcacattgttcaaatagtctatatgtttactgattcatttgactgcttgatttatcaattacaggtaggaatgtattcaaatctcctattaaagtgtgacactcaagtggctttttaaagacagagatgccaaaccaatgaatacatgattttccccaaagcctgcacaaattctctaatgaaattttaccatgaaagtttgtttaattaaggcttactaaagcagtatgttgtcttttactttttaaacagagaatatatattttaatacatcgtttaagtttatgattaattatctattactgaggataagaatctttgcctgtgctcattcagcatttgcacttcatttatgatctgccttctcatagcttctgttaatttttatactagagacatttatttgtttgtataaatgttgaaggtttttttttgttgttgttgtttttgagtcagagcctcgctctgtcacccaggctggagtgcagtggcatgatctcggctcactgcagcctccatctcctgggttaaagtgattctcctgcctcagcctccagagtagctgggactacaggcatgtgccaccaagcaaggctaatattttgtatttttagtagagatggggtttcgtcctgttagccagggtggtctcgatctcctgacctcatgatctacctgcctcggcctcccaaagtgctaggattacaggtgtgagccaccgtgcccagctgggttttttatattataaggagatgtaatagatagatagatgtttcaaagatagtcaaatgtttttaaaatttaaaacacttttttacaggttgactttcaccatttaatttcatctatgtgttttgccttagagaaattttaaatgctatgtagatctcatgacttataattatgaagcattttgttttctgttttccacgaaacttagcttaactttgagcatataatagttgtaaaggtaggagagtaacactgaaaaaaggaattgcataaaaatggcacattttctgtagagttgtttatcgcctgaaaataggccccatttcatggaagtaagatgatcaggctcaggtccccagacgaaactcttggcatggtttttggagatagtccagggctcagtactggctctatcatttgctacttctcccaaagtaaccaatatctcatccaccctgagcccatttccatatctctaacatgaggataatagcatctaccttacacaccaagtagagggatcaaatgtaggaactaaatcaaagtaccagcactgaataacctacatcctcccacttcccaaaaggaagagagatgtatcccctgttgacaaacgagaccattttgcaggagagaaaggaaatgccagttcacttgcaatgtaaacatgctctctctttttagggatgtccagggacctgagagagaacccatgcttaccaaagagtttctagttccagacacacaggactcgaagggtgacaagtatggttttcagggtccctgaatccacccagtcctcacagaaactcctaaaagctgtcgattgacagcgttgagttcacagctctggtcctcacatgctgatactgcttgtgatatcgaacccgacaggaccccacatcacaattgatttaccaactacaatataatacctcctgaatctccaaattggctcacccaggaacaaaggcttggggtaaaactggattaggagatataagctctgaattttctgagggtgagacacacaaggattctaagtgacacgccacagagtaacgggtctgtgactggaggacccacagatttgtcttactggagacaccacatgcacacaaactccatccttagctgtggaaacaagggtcttttgctatcttagccgaattctgggagtaatttttggaggggaggagatctttgggattgcctctttcaggccctttacaaaaatacctacttcttaaatggtaaagcttacactaaactgaaaaaattacatccttggctttttatgaagtaggtgttggattgaatcactactggaagaagtatggcatcgcaaattctaagcagtggtcaaaggatggatctgttaaattagaaaaatctctaaatttataaaaagattttagattcctttattctaaacaattgacctatttgtactcatgggacaatcaaatttcaaaggagatatgtaacgatttcatggcttgcattaaaaatccttctgataaaattaaagataaaaaatctgaccccctgccaaaaaaatcttttgaagttcatactgcctgctttcaatattctgtgggattcacaatgaaaggtgccttatattgtggcctagcttcaagtttatgccttcgccaccatggcctgggttcaattcccagtcagggccccagcgcctttggtttaatgtttgcgtggcatttgacttttttacctatttagtattggtgagattacctttggtaaaaaaaagtttaaagagtggaaatcgcaattctttgtgttggctaaaatctgattataagagatctggaaggttttatttttctttttcaaagagctctatggtcagaagtcggcttcatgaaaagctaatatttaattatatgtacatacagtctttctggattttctcttttgcctcctgttttgaaaaatatttggatttgagtgaaactccgttttagaaattaattgcttggtacaatatacccatgtaactaccctgcacatgtaccccctgaatctataataagagttgaaattttgacaaaataaaattagattttgaattaaaacaaataggtgcttggttcctctgctcacttctttttaaaaggaattcctctcccatgtacttcttcttttcccttctttaccttccttttggcatctttggtatcacatgaagggatctagagggaattttaagtgactctgaaattccttgagaaatacacaaaaagatcccactcaccccttttgggggtctcctgttctccttgtggagtccagagtcagggacaggctcctccaggtctgcagctctgctctcttttatttcatcttggctgattgctttggttttgtgagtaccaggcattactttgtactgtgagagacacgtcctttgtgagtgcaacggctgctgggtcactggtgagggctgcagtttggagatggctgagagccgttgcaataaatggttgtgattgcagggggctccttgtttctttgcaagtttagatgagaaaggtgcagtttggacacagtttaaaggctgtgaaaacaccaccaatgaatatgatttcctttggggatggtctgattaaaagtgggctgattgttgctgtgctactagccttgaagacatgtttctacagcattgtgcagtgtggaaaaattgtgtggcttggtcttgtggcatgtcccttcttttagagacctcagattcaatgtgaaattcgggatttttgattttcaaagatctagatgccctgccttccagatgtgcctactcttcacatattttaaaattagatcctataaactgcaaatactttgttggcttctgtgagatcagaggtccagttagaaaaggaagacagtttgttaaaattaaaaactatttatctaatctaactagattggcctccaaatatgactttctgacattcagctggttactctgaaaagatttctaaatctcttgaggctcatctatatgtttccttgcaaagaaaaaaaaaaaaaaaaaaaagcaagcccaagcactagtaagaaaaagatttgcaatgtttcatgaaaggagtagatgagtgaagcatttatttgtagatactgggttggatacctgtgcaaagaagaagaggtcaataataaaaattgccaggggatttcttggaacttaacaagctgaattaaatatagaaatgtcaggaaatcaaggcaggaaatactcacttgtggttaggcagacagggcagggttctgagcttgagatggagcaaacagttgtggtgggtgaagttcacatgctttagagctcagctgtcctagtaaagaagcctaagagtctctaaagctcttatgagaagatggattttttttgcctagattaaaaggttaaagaattgctttaagttggataaaataaagctaaatgtttaagcaagttgtgaaaggtttatgaaaaaattaattaaaatatttttgtgtgtaaacatattgactaaagttgaaggggtataattcagcatttctgtaaattgagcattgaaataaaaacacaatgggtttctcttagagcactaacctgctctttaacaaaaattgtaaagggttatagaaagtctataaaaatgttaccttatggtcaaacattaaaattgggtaaatatgtctatcaggttttattaagaattaggtttaacattaatagtacactaatgtaaaggtgaaatttggcttatttggtacaaaaatcatacaggaagcattgtgaaatataaaatgatttttagctttctttgggctatatttctataaatatgttattgatgagggttccaaagttatgggagactcctataattctgctatatctcagtgtacattatcagtcataattataattgtcatgttaaattattgtgggccacagaggtaacagatttccttgtcaattgtgtctttgactatgactaccctaaaacgttcagtcacccatatacacatgttaccttgttttggccctctttagaaggtaattttataatcagctataaagccctaacaggtgctcttaaatgcaaattttgataactttggagattgtgacatcagaagagaggaaaaatgttcgggacacttggagagctaaaatgttcattgatatcaagcaggacaggaattaactgcatgaagtgaactaataggaggctgaagtgatctttttgactttttgcttaaaacgttgctgatcctttgttttgcttttcagagtcaaggcaaattttcttttgagctattgacagcttttaacgattaatcaaaatatactcctatgaacaccatttggagcattatttgtttctctctacccgatttccccagaatttggaaactatttgtgggtattcttaatttatggcaatatagttatttgcataagtgcaataagaatgtgttttctttggtaacaggacacaatttgaaaaactggttattttaccaaggttttgaccagaatgctgtgctttcctttaaggaatcaaacttgacttgtggagctaataaagcctttggaaaactgaccttatatcctgtgaacacagtccctgtacagggttactgatctgtgggaagaaaagaatgtcacattctgacaggtcaggaatcccaagttatcttgaaacttcaagaggacaggaattcacccaaccatatgtatttgatggtagaaatccatggcaggggctcagctttaaaaagtcttatctcagattccttctataaaacaaagtcccattaaaaccaattttaaaagcctatgtgaaaaataattattcttgctgcacctcgtacaaataaagtggcaaagcataataaagcaaattggtcctgtcgtaatttgtctttagtaaaaacgggaaactggggtcgggtgcagtggctcactcctgtaatcccagcactttgggaggctgaggtgggcagatcatctgaggtcaggagttcaagaccagcctggccaacatggtgaaaccccatctctacaaaaatacaaaaatgagccgggcatgatggcgggtgcctgtaatcccagctactcaaggggctgaggcagggaagcggaggttacagtgagtcaagatcgtgccacttcacgacagcctgggtgacagagcaagactccatctcaacaacaacaacaaaaaagggtaactggagagagggaagttatgtttcaaaaacttttggaaactatagtacacctgtttttaaattctagtctggcattcagtttttattattttctacagtttgggttaaattcgtatttctctggctacaagtctcctaaataatcttttcatttgtttcctttttctttccctttttccccatttttcttaattggaaatcactgaaacctaagctgtgctttcttaaagccctgtgaactgaagactagacaaccgaaacttctgaaggaagtagcagcaacctatttatatgtgttgctgttgcctactattatgttttagcaggtgctgcctctacacccccgaaacagagagtgctactgggaacaaatcgactttttccactccagtgctgcattcggtgccccataacgatgaccccctctcagcaggaagtagccagaaagattacaatgctccatctccctatgattcttgtgataaataaatatacaagcatgatagaaatcatgcgcaaattgacagtggggattgtggcaggccagatttcactaatggaggtccccatcacaactacttcagtactgactgagtggttaagttcagtatcaaaagctgaaagtgccagcgcctttctacaaaggctagaatgtaacaaaagcccaccaagggttttacctaggcctttcctgggccttacagcatgacaaaacaaagaaggaattcttaaccagacctgtttaggattaaacaaatttaattgggggtctgaagaaactcgccaggcctccacaaacaagttcattgggggtctaaaggaaccccccccaaacctctgtgattgagcaggagacaaggtcagggtaattgccccagcacctggactcatttagatttaagtaaatgtactgaggctccagagaaaggtctccaagacttagactagagttacagattaaaagaagttaatcacttatatctttagataaatgcacactgacacgtagacatacatcttagaaaatatataagctctggaaaaccttgtaatttacagttggtctggagatattttctgggccttctctctgtaaccggttccagaaataaaaaactctcttcctccccagtttatctgcatctcgttattgggccgtgagaaatagcagccagaccctgagtttggtctgggaacacactggctgggcttcctgcctggcggtagagcttcactgtcctccttcccagccaaaatgtggcccttgaaggcttcctccccaactgaccggttttgggttctaggtactcagggaacaccgtcttcaaggaggccattttcatactgttcctggtttgatttttctgaaattaggaaatgccccttgaggcatccaggattgtctttatttcccctgaagcttcccctcctgaagaaaaaagttctcaaacaccctcaggactcaaaccccaagttcaccctgtgaaacattcccatttcctaaacccaggcaggctcatggccctcagcctctcagaccccatggaaacctcctcccccacttcacgggttctctccatattgagagcctcccctcctcggcacacaacccagagactcaccccaacatgtgtagcaaatcaccctggaaacaatcatggctgaacgtggtagcccatgcctgtaatcccagcactttgggaggcccaggaggtggatcacctgaggtcgggagttcgagaccagcgaggccaacatggtgaaacctcgactctactaaaaatacaaagttcactgggcattgtggtgtgtacctgtaatctcaactactcaggaggctgaggcaggagaatcacttaaacctgggagacagagattgcagagagccaagatcgcaccattacactccagcctgggcaagaagagtgaaactacatctaaaaaaaaaaaaaaaaaaaggaaaaggaaaagaaaaaaaaaatcatgaggcaacattgcatttaacaatattttatttatcaaaagacacttgtctttctcaggtaagtgaaggtctagagatgaaacgagtcccgatgtaaattgccccatgggcattgctgagatcacaagatcatcactgcagcatgcagcacaatagtaaatttctcaggatggaagttcaacaatccaaaaggtagtattttttttcatgatgctcagtccatcatacgaaataaaaataaattccttttcatgatcatccattcagtagaaaaaatgatagtaaatttgttctcatgaagatttttaccgtaacatataggatttatcgttattattattattctttgttttttgtttttttgaagcggagtctcactctgttacccagtctggagtgcagtcgtgcgatctgggcacactattaacctccacctccagggttcaagcatttctcctgcctcagcttcccgagtagctgggattacaggcatgcgccaccacacccggctaattttcgtatttttactagagatggggtttcaccgcattggtcgagctggatttgagctccggacctcgggtcatccgcccatctcagcctcccaaagtgctgggattacaggcgtgagccaccgcgcccggcctcaatttatcattattcacgcatccacaaactgggttcttatattttgtacgtgattttttccattgaggagagatatctgtgcatattcatgctgctcatatttcatccacaaactcggttcatatttcatccacaaacataattttttccgttgagaagagatacttgtacatatttatgctgttcaaattcacatttcatcattcttttacaagaaatagataatgtattttaaggttttccagtggtattacagatattttactgggtgtatagatagaaattaaaccaaacttctttgttctggccgccagtcatgcatcctgttttcaacatagttcacatacaactggttgtgtaaaaatgaaattattttgtttagtacaatcatcaacagttggttgattagatttttaattatcaagttaatcattgtcattatgcttctcatcgcactcgtcattaattgctgtgggaggaaatttgttatgttccctatgagagggtgtatcacaaattcaaataagaattcaacgacaatggactgtataaaggaaataagcaagtccatggaaaacatatttttttccggaaaggattaaaatatttttaaaaaggaattaaaaaaaaattgggcacggtggcaaatgcctagagtcccagctgctcaggagatggagacagaaggattgcttgagcccaggaataagttggaggctgtagtgaacagtgattccaccactgtactccagccagggcaatagagggaaaccctctttctaaaaagacaaaaagaaacaaaacaaaacaaaaaaacaccacatcaaaaaacccaacaacaaaatgaaaaaccaaataacagcaatacaattggagctattcgatccaaagaagtaaatgaaacataaagcaaataaaagagaaaagctaatacctgtgtcctgcaggactcagtccaagttctgctctgactccctcctggtgagccaccccttaaaaagtcacttggggcggggttactttgacagacagtcttctgtcaaagagggaggcggtaaatagcacttttttttttttaatttaacgcctttccaacaaattagcggctatgttgtctaagagtgcaaatgtcagaggtgggtacaggcagcaagaccctccccacaggggcagcagaaggaggaatgactaagggaacaagactttagtgtgctcaactacacaggacaggaaacagatgctttttacaaaagctggtggacttgaaggcagaatattttcaagttcctgtaactgcgaactatgacctgtagcctgtgagagtgactttctgtggcaaaggagcttttgtgaatgtgaggaagttaattatcttaacagtgggaggttctcccggcttatctagctagaccctcgtgaaatcccaagtgtccttaggaaggggaagcagagagagatttgagtccagaagaggaagaaggtgatgtgaggcccagtaggggaacaaagggcgatggcatgtaaacacttagcccccagaagtgggagagggctggggttcatcacaccagaatccctaacaatcagccttattttaattacccttgaaatggaaggaggccttagagagccagaggcttggaggggcaccctctgctgcatacacagatcccaactgctgtgggctccaaataattgcaccagggaaatcacaaattatcaaaaataaaggatgtaaagcttttaaaaaatattaaaagcccaacaaataaaaaaagttctaaatctataaaattgacctcagtctgtatatttagatgagtcatgtgtatatagcgtttcacttcaaaatatatgataaatctctcattcattggcttaaaaataaacacttcaatcaagtctttatcagaaaaattgaaacgttaactcaattgccttttagttcatgtgactttacaaaacttaaaacaataaagtcagttttaaaaattattagtaaagtaaaagaaaaatatcttcacaatgtagacattttgtccacatgagacatgtgaaatattgccattactaaatatttgcaggtcaaaaactgtttccaaaacattttaaataatcatctggcctgtctgttttagagcattcaattctagctgaggtctggggacatgtgaaaggagccacggcccgactccgtgctgggaagagtcagacattttccacagctctgtcctttgctgtgggctctgcaactcctaccaattaaaattgcttacgtttttgttttatttttactaaagaggggttcctaaaagctaacattatactgagtatatgtaactaaaactactaagaaaacaatttcacaattatacaaatgtgccaagtaaatgaaaaaataaactgtattttaataaaggttataaaaagaaaaacatatagtggtgtgaggactgtctcaggtcttcactgagcaagggatcatgacattctatggcggacagctgaccttggctttctgctcctcttgattatgtctactaagtgacatacttactctttttccacctgtcttgcctctaagggtaacaggttttatgagatccctcctagtgctttgcaggtcagcctccctttgctgcattccaattttactgcctataccctccagctggcttttgatgacaaaagtcctggtcccagccattctcagattctgtcatccccgtgggcactatggagctcagcactatgggaggttccccaaaaatctcgttttctatgaggaatggccaccacctgcatctcagtgatgctagtgacccctttcctactcctgtgctcactggtcctcatgaagatcctggttggtctgtagccccctatttttcctattaaagagaaattacagtaagacccatttgtgtgcaaaatcaattttaggcttattacacttggcctgataatttgcataaaatgcagcaagaattcatcggccatataggctacttttgagttaattttcctgggtttttacctaaaaatatactattttggttagagtcttgtgaaaataaccaatgtgttcaattgttttattttaaaaggctcttactgaacactataaatatgtataagttgaatatacaaactatattgtcataaaatcacaacccaaaatgtggagaacgcagagggaaaggtaaatttgctcgcaaaaacatacttcacccaaataactggaaaaaaaaaaagactttcatgacccttctttaaccagagcagcagctttcaaacaaggtgtttgccttggaaatgccattcacaagccaaacggcccttgagagctgtctgtcaggcactgtagaatctagcagctcctcacagagttagaaatagtttcaggaaagagattccctgcttttagtaactgcactttatattcccagatagcgagattgtatgtaaaccatttttatcttattctggaactcttttgggtactttttttttttttttttaaatgatggagtctggctctgttgctcaggctggggtgtagtggtgcgatttcagggtatgagaaaatgcagctggacctggctctttccaggaagaccctcacagccaaggagtccaaagcctggggttttcatctaattccagtgtgactggggtaggagcagctttggtgctgggtgtgtgtgtgtgtgtgtgtgtgtgtgtgtgtgtctatgcctgtgtctgtttagggtgttaggctcgtggttgtctagatacaaatgtcccagggctcaggagccccagggttatgtcaggggcaccagatgaaggtgtcaacagaagttagggcacaagggacaaaggtgagagcaaggttagattcatttaggtgcaagaaatcatagagggaggagggagaggaagccctcctgctaccaccgaggaagaagcgcagcttaaggcagaaagcctgtccggagaggaagtgagtttgagggcagggctctctgggtaaagtacggtctgggacaccagcctgggggaagggtacagaatgcagagtggcctggcgtggggactaagaacagaggagagcagctttcactgggagggtcagtgttttcagtgtccagcactgagcaaggtgagatttgggcagcttgctgtgaaataaggtcaggctctggcattgtccccattgcgtgtgtgtgtgaggggcactttgggagagtgaactctccacctccatcctctcatacgtccttcaaccgagcttgccagttaccctgattccaaggagatctatttattgttgacaatactggatcctagcagaggctgggtaggagcctgggcacaagcaagtggaggagggggcctgggcctgaaagacctgggaggtttgagagaggacacagcccacagaatggagcagatggggtagagtcggcaagcattcagggctcctagtaagttggacaatggagaccctgaaagatccagtaaaacggggagaacaaacaggtccccaactcacatccttgcagtgcctggagcttcagactccagacaggtggggaaggaaaattgagggatgtgaacatgttggagaatgtcgtgccctgaagaatgaagaaaaggggggtgaggaatgagagcaggaacggcttccagtgcctggtgcccaggagaactcagaaaatgggtgtggtggagaggaatcgaggaaccggaagtggtggaagtgtgcagggcccctccgagatcactgtgactgccaggcgtcctccctggctggagagcttcactgtcctccttcccagccaaaatgtgtcccttgaaagcttcctccccaatggactggttctgggtcctatatatttgaaggggtggcctgcctctccacacctgtgggtatttctagttgggtgggaggagagacagagaaaagaaataagacacagagacaaagtataaagaaacaacagtgggtccaggggaccagcactcagcacaccaagggcctgcaccggcaccggcctctgagtttcctcagtttttattgattattattttcattatttcagcaaaaaggaatgtagtaggagagcagggtgataataaggagaaggtcaatgaaaaacatgtgagcaaaagaatctatatcataattaagttcaagggaaagtactatgcctggacgtgcactcaggccagatttatgtttctctccacccaaacatctcagtggagtaaagaataacaaggcagtattactgcaaacatgtctcacctcccgccacagggcagcttttctcctatctcagagttgaacaaatgtacaattgggttttacaccgagacattcagttctgaggggcaagcaggagacagtggccttcctccatctcgactgcaagaggctttcctcttttactaatccacctcagcacagaccctttatgggtgttgggctgggggacagtcaggtccttctcatcccatgaggccatatttcagactatcacatggggagaaaccttggacaataccccgctttcaagggcagaggtccctgcggctttccacagtgtattgtgcccctggtttattgagactagagaatggcaatgacctttaccaagtatactgcttgtaaatattttgttaacaaggcacatcctgcacagccctaggtcccttaaaccttgatttcatacaacacatgtttttgtgagctccaagttgggtcaaagtggctgggtcaaagtggctggggcaaagctacaaattaacaacatctcagcaaagccattgttcaaagtacaggtctttttcaaaatggagtctcttatgtctttcctttctacatggacacagtgacagtctgatctctctttcctttccctacatatattcatggaccacagtcttcaaggagtccatttcctcactgtttttggtttgatttctctgaaattaggaaatgccccattgaggcacccaggattgtctttacttcccccagagcttccactcctgaggcaggagcttctcaaacaccccccaagactcaacacctaatttcaccctctgaaaccttcccatttcttaaatccaggcagggtcatggtccttagcccctcagatgctgtggagaccttctttccctttcatacattctctcaagattaaaagccacccctcctcagcacacaccccagagactcaccccaacatgcattgcaaatcaccctggaaacagtcataagaccacactcatttaataatattttatttatcaaaagacactctttctcaggtaagtgaagttctggagaggaaaagaggagtcctgatgtaaattgccctgcaggccttgctgagatcacaaggagattgttactgcagcttgtagcacaatagtaaatttcttctctggatggaagttcaacaatccagatcgtagtatattccttttcattatgctcagtccagcaaatgtgatgataacaaattccttttcatgatcatccattcagcagagaaaatgtttgtaaatgtgttttcatgaagatgtttaccataacatacaggatttaccattatcaatgcatccacaaactctgctgttgttttttatacataattttttccatcgagaagtgatagttgtacatattcatgctgttcatatttcaaccacaaactctgctggtttttttatacgtaattttttccattgagaagtgatacttgtacatatttgtgctgttcatatttcatgtttcatcatccttttacaataaataggttatattgtattttaagtttttctaactgtagtgcagaaattgtactgggtgtatacatagatatcaaaccaaatttacttgttctggctgataatgcatcatttatttcatagattatgtatttctttgacacatttcacgtacaactaattgcataaaaatgaattttcttttagtatagacatcagcatgtgcttaattcggaatttaattgttgagttaaacatcgtcattgccttttccgttgttattaattgctctggtgggaattttgttatctcatacataagacagtgtgccacaatatctcttaaaatttcaatggcaataaactttatatttaaaaacagggaatctatggaaaacacatttttttctaaaggattaaaatatttttttaaaataattttctaaaaagttaggcacggtagcaaacgtctagagtcccagctactcaggaggctgagacaggaggattgcttaagcctacgagttgggggctgcagtgaactgtgattgcaccactacattccagccagggcaatagaagttaaccctttttctaaaaaaaaaaaaaaaagaaagaaagaaagaaaaaaagcaacaacaccaaaacctcaccaacaaaatggtaaagaaaaaaaaaacagcaatacaatgtaagctatttgatccaaagaagtcaatgaaatttaaaacaaatgaaagggaaaaagtaatacttgagtcctgcaggactcagtccaagttctgctgtgcctccctcacggtgagccacccctttagaagtcacttgggtcataagttaacccgataggaagtgtcctggccaatgaactagggaggtggtaaatggcaccattttaaatttaaattcacggccttttcaacggatcagtagccatgttgggtaagagtgcaaatgtcagaggtgaaaagaggcagcaggaccctcccctagtgcttgggcaacagaaggtggaatcactaaggggacaagactttagcatgctcaagtacacaggacagaaaacatgctttttacaaaagctggtaaatatgaagagggaacattttcaagttcctgtaaccaagaactaccgcctgtaaccggtgaaagtgactttctatggcaaaagcgtttttgaaaaggtgaggaagttaaatatcttaatgttgggaggttcttctggtttatctggctagaccctaatggaatcccaagtgtccttatggagcggggagcagagagagagatttgagtccagacgaggaagaaggtgatgtgagtctgggtgcgggacagggggagaatgatgctatgtggggatctgggctggggaatgacttagctgcatgagcggagtgacttagactcctgaactagaagaaatctagggctcatcacctcagcagccctaaccatcaaccttatttttattacaggtcttccatcgacggactccctaaaaagccagcggcgtggaggggcgccctctattggacaaatagatcttgactactttcggccctcaaatagcctgactaggcaaataacaaataataataatttttttttaaatcatggaaaatattttaaaaaacaattaaaaagttataaatctataaaatctgcttctgtctgtgtgtctgtatatttagatgtctcatgtgtacataatgtttcactaccaaaatatatgatgaaaccctcattaatcggcttagaaaactaaacacctaaatattttctcagaaaatacaaaaactttaactcaaatcccttttaattcacctgactttaaaaatctttaaaaaataaagcatgctttaaaattattagtaaagtaaaattagaacatcttcagaatttagacatttggtttaaattatacaggtcaaatactgcccttagtaaatattttcaggtcataaacaactcctgtaatcttttaaataattgaattacatgtctgttttagagctttaagttctagctaaagcctggggacaaatgaagggcaccatgccccctctctgtgctggaaagagacattttctacagctctgacccttgcagtaggctttgcaactgctacctatcaaaattgcctacatcctaagtttattattaaaaggagttgcttggagttaacattataatgaatatatgtaactaaaactatttctcatacaaagtatatgaaaaagtagaatgtatttttaataaaaagttataaaaagacatgaacatgtagtttttataaaaaacagtaattttgtctagttttgcagttctaaaaagttatgttaaattcaaaaataaaaaataacaagacaagactcaaggtttaaataagttgtaaaagatttgtaaaaattagttctataaaaattttacaaaaaaaagcattggttaaaatttaaggaattattttgtttttacagaaattaaacattcattaaaaacactctgatacaaggccttaatttgggttcatgtatcagaatagcagggttttcttagaatattaatctattctttaaaagaactatgaatgttatgcaaactttataaaaatcttaccttagagtcaaactgattaaaattccatagattttacgtaaaattttattaaaaattaacttcaacaaaaataaaatttgattttctcctttaaacaaaagttttgcgtaatattaaataataaagcatttttgtttaccttttaaactataaacacacacacacatacacatacaccaacactaaagtcagctgacctcatactgtctttattggatattcttgtttaaaaaactatcttctttggaaaataaagttttttattttaaaccatattttaaattatcattttgactaaatccataacatacagtgatctgtaataattctattttataatatcaagtgttttgaagaactccaggaacagccatgagagaacactgtggtttagtaacactttatttcctcagtttgaaaatagttgtctttcttggggaggccggtttcagcagatgaaaacaagagtcatgatgaaaattacccagcagtggttagtgtgaccataggaacattgtcatcaggtcagcagaaaacatatcagcaaatttttctcatactggcagtgtgtaggggtggatgtttacagttcctgaagccccagtggtcgtgtggtcttttagttttgccatttataggcaacttgtggtaactagctcaattagacacattccttatcacaaggacagagggctttctgtatcctagggttcttgccttggcattccagaagaatcaggtcacacgtggacgtggagaatgagtgcaaggttttattgagtggaagtagctctcagcagatgggggagccagaaaggagattggtttctccctggattggggccgttcagcagccctggctctcctctgactgccccaggcaaaatccacatcgttctataagtcggtgccctgctggtgtgctggtgcctgttgtcatgttcctcttcatgtccagccgcctgtgtgttcctccgctgatgtgctcctctcgacgtcaagcctcctgtgtgtctgactgctagggtcttggggtttttataagcacaggatgggtcttagcaggccaggatgatcttgggaaagacaacattcggtcaggaaaacaaaaatgcctgttgtcatctaggtccgtggggacaagcccaggtgtggagcttttagccagggaccacagcctcctgtatccaacacttcccttcaccttttctatatcattcaaagggatcatgcccttcccatcccagcacttcactttcatgtcatttgccccctctgaagaggtacatctaactgccattagaatatggatgatgaccagtcttagctgcttcctgctgaaagggggcattgttttgggggaaaacggcagtcagattcctcccaggggtctctataataaaagatcgaggtggctactttcaggaggtcctctaatgtactatctggtcccaagtcccatttctgcaacctcctcctgatgtcaggagctgcctgagtaataattttatcctttaggattatctgtccctcgattgaattaggagatagagaggtgtgatttaccaaggcctctcttagcctctccaggaaggcagtgggattttcatcaaatccctggttaattatggacaacttagtataattgagaggcttggtcttagacctacgtaagccctctattatgcacacctgaaagtgtctcctcttccagtcttccatctcattattgggatcccatttagggtccttcactggtgctacttctcttccagttggataatattcgctcccttccctgatgctataggtgatgcaaagctcatccccaaatctctctgctgctggcagagcagcctgcttctcagtgtctatcaggttctgactcaaaagtaacataacgtctctccaggagagttcaaatgttagggtgaaattctggaaagcttctatatatctatcagggtcatctgaacacttgcccagatctcccttaatttgctttaagtcttgtagggaaaagaggacttggaccttactgggcccaaattcactgggcatctgtaggaggggcaagagtgagactgggcttgtttgggatgaagatttctaggaggggccaggtgagaggctgaagctggatacggaggttggggtggacccagaggagcagggcttgagggagctggcacgtcagctgggggtgcgtctgggactcgtgtctttaattccctgggcttgaccctggcagccttccccgagacagcaaacaggagggctggaacaatcctacatgtcagcaaaggtctggattgctttgcaaggtatagaaagcctgcacatttggggcctcagaccatgtgtcctcacatccagagaaaagttctaattgcaggatggtattgaaatgaatggtcccttcctgaagccaagccagtccttcctgtaaaccataatttggccaaacctatgtgcggagggctatgagatgcttttcctctggattctgagggtcaaaacagtcccaatggttcaggatacactcaaggggagtacaagctgggggtggtgaggagaactggctgcccattctgaaagacagggaatagaggtgttcctcatttcccttccttcttttggcaaaaagctcagggtgtgatggggagggaaagcaagcatcttcacttcactttccacctcttacccctgcgccctggcaaccttggcaggtgccggccacaggtacaaatgcggtatgtacccatgaagcagggagaacctggagattaggaattaactgccctcacctatgtttccttttctccctgctgttgaaaaactttgagttccctgggcctttttatcccatgaggcatggcctccttctgtgggatggggttcagtcagcaggaattggtcctgtccatttacattgtgcctgttgcctggctttgaattcctcagacctgctttctctttctagggcctcagcctgaagcttggaattgagtttgggactgaaaaagcatttcagaggctgtttatatccatttagtgcctcaaataagccctgctgaatttgcaattatcagccagcaggggtcactcctctgttaacttccctattagaaacagagcggtggggattctcacttagaaaagaaaaaaagagaaaaacagttaaagaggcaaaaagtggggaatgctgggggaagaaccccttgcttagtgcaagtgggcccctctaatccttataactttcccatccttcccccagttcagaccaggttgaattccttggccatggaaggaaaggttccattgatgcagtgggtgagaagcactctgtagggtcctggctaccatcggttttctcacacccccctcatcccaggcagtggagggagacacttctgcgacattgctccccctgccccttcatggctattgggtgtggcctttgcctgctgcaggcatgcctaggtgctggagctgggagggaaaagggtaaggagaggtgccctggaagccgctcatgcctggggctgtcaaggtggaggcatacatggcacctctaggaaaaattggtctgatttgcacctttggcggctgagccaaatgctcattttacttagtaacattgcctcagcctgtagcaaaactcttaacattataaaggaagagataagatccatttcaaataatgtgtgagagagaaaagagatgaaaggaaaacagagtcttttacctgcaggaaagggagagaagtggcagagttttggaagaaaggcaggcccaacagtttcccattcactcacactcaccttccgagatcccagacgagccaccagttgaaatgggaaaagtttccttgtccccctcacaggaggtggagtgggggtgtggcttgcttctttagtactccgctgctcaaacctctagggaagcatacagactggcaagttgtggggctacaaccccatggcagcatctaggggtagatgtttacagctgctgaagccccagtggacatgtggtaccatgtgctcttttagttttgccatctataggtggctttgtggtaaccagctcaattagacccattccttaacccaaagacagagggctttctgtatcccgcggttgttacctaggtgtaccagaaaaatcaaatcacacgtggtcttggagaatgagtgcaaggttttattgagtggaagtagctctcagcagatgggggagccaaaagggagaatagttttcccctgaagtcgggttattcagcggcccaggctctcctctggctgccccagccaaactctatgtcaatccattggtcggtggcctgccagagtgctggtgcctgttggtggattcctctcagcgtcgagagtttttccctctcaggaaagggagagaagtggcagccacccatgtgttcttgcactgatgtgctcctctcgacgtccaacctcctgtgtgtctgcctgctagggtcccagagtttttttaggcacaggatagggcatggtgggccagggtgatcttgggaaatgcaacatttggtcaggaaaacaaaaatgcctgtcctcatctaggtccaggggcacaagcccaggtttggagccctagccagggaccccggcctcctctacccatcactttccttcaccttttctgtatcattcaaagggaccatgcccttcccttcccagcacttctcttctgtatcaataggtgatgtttttaaaatttcccaactctagtgcaggcatggtactagacatatacatagaaataaaaccacacttattcttctggctggcaagacatagtatttttgccaaattatgtgttgttttgaagcattttatgtacccctggtcatataaaaataaagctattttgttcagtacaaacagcagcattttctggattagaaagttaatcatcttaaaagatcatcacggatttttccattgcactcatcactaattgctttggcaaaaaatttcttatctcacgcatgacaaaatcagccgcagtatctcctagtaatttaatggtgatgatctttataaaggaaataagcacatcaagggaaaacataattttttttaaaaaaagagtaataaaactttttaaaagtcttttttaaaagactgcttttctaaaatagtaaaataaaactccaccaataaaaccaccaacaaaacagaaaagaaaaaataatgatatgatcggagctatttgatgaaagatggtaaattaaatttaaaatgattagaagagaaaaagcaatacctgtctcccgtaggtctcagtccaggttctgctatgcctttctcctggtgagccacctatttaagagtcgcttaaagcatatgttaatccaacaacagcagattaaaaaccaatgcaatctgaactatttgatctaaaaacataaataaaatttaaaacaaataaaagagaaaaagcagtacctgtgtcctgtaggtctcagtccaagatctgctctgactcccttgtggtgagttagccctttagaagtcacttggggtggggcatatgttaattccactaacattggttctggccaatgagtcaggaaggtggtaaatggcaccttttcttcttgctgatttctttcagttcctttggagtctggacattagtcctttgtcagatgcctagtttgtgactactgtttcctatactgtgggttgtgtgtttaccctgctgatatttcttctgccttgcagaagattttcggtttcattaggtcctattgatcttattctatttttatatttttgcgtttgcttttggggcattagtcatgactacttggcctaagccaatgtctagaaaagctttttggatgctatcttgtagcatttttagactttcaggtcttagatggaagtttttatatgctttgttaaagatcaggtgactgaaagtaccgggctttgtttctcggttctctattctgttccattgctctatgtgcctatttttatacttcctgcaccatttattgaataaagtgtcctttccccaattagtgtttttgcatactttgttgaagattagttgtctgtaagcatttggctttatttctgggttctctattctgttccattgctctatgtgcctatttttatacttcctgcaccatttattgaataaagtatcctttccccaattaatgtttttgtgtactttgttgaagattagttgtctgtaagcatttggctttatttctgggttctctattctgttctattgctctatgtgcatattttataccagtatcatgctattttggtgattgtagccttgtagtataatttaaagcctgccttcagatttgttctttttgcaaagtattgctttggatatgcggtcacgtttttggttttgtataaattttaggattcttttttctagttctgggaaggagaatgatgatattttgatgagaattctactgctctgtagatggctttggagagtatggtcactttcacaatattgattctacctattcataagcttataatgtgttcccatttgtttgtgtcaactgtgatttctttcagcactattttgtagttttccttgtaggaaacttacattaacctacttggttaagtatatttctaagtattttacttattaaaaattctcagggaaatgcaaagtaaaactgaggtgggaaattaaagaaaaataaaattaaaaagaaagggaaataagctttcttgtattaagctaacttgtcccagaggcagcaacaggcacagcccagacccaggaaaagtcttgataatattatttattgtattctggagactcttccagcactccttcaatgtagggagaagaaaaacaaattttcctttgttttatggtatgagtttatagattcttgttctctttaactagtaacttcaagtattctgttttatctaagaagtatggcaaaggtcatgagaagcctgagcaggcctgaactacagctctctaggcaccatagtgaagataaaccaatgcaagcctctttagagcaaaacctagataatagacatctgggttgcatagcaacagttatgtgcaatcctgagttatgaacctgttacaatttgattaactgtctttttcctgcctctgtatccctgctttcacaccactgtaagcttgcttcaagctggcccacccccttttgtgaagtgtgtataaaagtcaagtgctgtctttgttccaggccctgtctttggacgtgagtctgctgggcctgagagcactcaataaaagattctcctgttttaacccaaagcctctctctcatcctcctaaatcccacaacaaaaccacaatgagatgctatcttaatcttgctagaagcccataatttaaaagtcagaaaacaatagatgttggcatagatgtggtcaaaagggagcactttgacactgctagtgggaatttaaactagtccgaccactatggtaaacagtatggggattccttaaagaactaaaagtagaccattcattccagcaatcccattactggctatctacccaaaggaaaagaagttattccataaaaaagacacaagaatatggatgtttatagcagccgattcgcaattgcagtgatatgggaccaacttaagtgcccatcaacgaacgagtggataaagcaaatgtggtacaccatggaataatacttgataataaaaaggaacaaaataatgtcctttgcaacaagttggatggaactggaagccattattctaagtgaagtaactgaggaatggcaaatcaaatattgaatgttttcacttttaaatgagagttaagctatgagaatgcaaaggcataagaatgatataatggacttggggactcagggggaaaggttgggagggggatgaggaataaatgatgacatattgggtatattatacactgctcaggagacagatgcctcaaaatctcagaaattaccactaaggaacttttatccacataaccaaaaaccacatatattccacacactattgaaagaaacataaacattattttaaaaaataaagccacttttaaaattagcaaaataaaataaatatgtcttcagagtttagatattggatccaaattagacagatcaaatactgcctttactaaatattttcatgtcattaacaacttctaaaacctttcaaacagttttttgacatgtcttggaaccatccatttctagctaaggcctgggcacctgtgaaatagggccatgcccccccttatactgggaagagtaagatatttcaagactaagatgttttctacagctccatctttttctttaagctctacatcaaggacataattaaaattggttgtctcctaagtggtttactaaaaatgcatacttaagagttaccattataattaatatttgtatctaaagctacttaaaaattttcacacacaaatctgactgaacaagtaaaatatattttaagtcaaagtttataaaaggacatgagaacatagcttttatgaaaaaattagttttgtcaagtttagaggttttcaaatattttaaattcaggaaataaaataacaaaaagacaaaagaaaatggttgaacaacttagaaaaggtttgttaaaattcatcttataaaacaatctacatgtaaaaagtgggctaaaatttgaaagagattatttaggttttccataaattaatccagaaggggtaggaagtcttaagaatgaggaaggacaggaggaaggggaggtcatcctgacactgcagaggcagaagtgcagctgaaggtatgaaggctaagaggggaggggagtttgagtgctgctgcctggctgtcagagcagaggagggtcctgggcaccagacttgaggaagggatgaaaatgctgggcagacctgtagtgggcccttgagatggcagatagtggtttccagagagagggccattgttttccagtgcccagcactgagcagagagagttttgggcagtgtaaaaaaaaaaagagaacttacctctttctcgttttagaaaaagaacagtctaagaatatcagcagggaaactctcagtgcttcaaggggttaaacgcccttttggctttcttgtgttggtttcatcatagaggaggagaaacttcttggaagtgttcctaaaaacacaacacgtctgcttctcctttcaaaaaaggaagtgctaaaacacgaacactctagatccaaatattaatacggatgtctaaatgcttccgttttccaaggggcagaaagctaaaggttgtaacctattcatttcagtcaaagttggtgaaagggaagcaaaggaactgggtggggcttggaaggatgacgaagctcaagctcattggccagcaacctctctcctgggggcgggaggggtgagcatacgtcattgctttggcttctataaaatgaggaggactcaccgagtgtgaagagtccttctggtgattgcagctgagagcacactcacgacgttctgcaaggattctctgattatgattctgaagggaaaagcgatggaatggacagcagagattgtaattttctttatcttgaattacggaagaaagtatctaggacagaaatccacgacaagtccttggaaccagcagatctcttcgttcacggagacgttgacgtattctctattgaagaagattcttaccttcttactggacaaggttttgtcagttctgcgtgactggattgtccgggagactctgaggaaactgatgtcacatgtttttccaaagaagatgtttctggaaccaacaactgtgattgtggtttgaggacttctgagagttccagtacaggaaataagcagaacatcagctggaggctaaacggatccagacttcactcttcacttcccttcctattcagtctattgtgcctgctgactgagaagcttggctggtatgtgagcaaataaacggaactattcagaaggagatgttgacatattctgtattgaagaagatccttatcttctcacctgacaaggttttgtcagttctgtgtgactggattgtccggaagactctgaggaaactgatgtcacatgtttttccaaagaagatgtttctggaaccaacaactgtgattgtggtttgaggacgcctgggagttccggtatgcgaaataagcagaacatcagctggcggctgaagggatgcagcctccactcttcacttcccttgccattccatctattgtgtctgcctgactgagaagcttggctggtatgtgaggaaataaacggaattataaacaaggagattgtttctcatctacttcattctgttgtggcttttctattttggggttcagggtgtgtgacaaggaccaaggagatgaaaggtttcatgatggagaaagcccaggcaatcagattgaagagctatccacagggaatcttggctgctgaggggctgcaccctgcaacggactgaccatatgacagaaaagggttttaaaggctcaacttctggactgagaacccagagtaatttgggaacctcctctgtgaggagatatgaaagctgggaatcatgacatccctaggaatggaaggcacatttcctgatggaaggggtgctttggaaaacaggagcagagtagacacagcagccttgtggatacgggtgggcagcatgcatgggtgatgtgaacgtggagtgtttgtgatcgaaactcaaaatgtctgacaaagtgaaaacctagaaaccacaatgaggaggaagagtttgtgagggcaatcactctccccatgtgtgaaaatcgggggctcttaaaatctcatctggagaggtgcagtctaccaaactctgggactttagcctccccttttaaaaaaccgtgcatcaataccaacgtccgaaaccacagaaataacacctggcttgcatggagacaaggacaaaaagccgtcatgatgagttgttctgctcacttgctgcctctgttcagtgcacaggatattgtccacccactagcaggctactgcaagagaagtgtgcaatatgttccctatgtgccatatatgtgccatatggcccatatgacaactgagtcagaaaatatctgatgccctcagagttacactccacctggagcttgcccccagccatccaggacctaggctccctaccctgtccaattttctggtgttttgggggcttcattctctaaggtgtgcccactctttactcaaaccaaaacacccacatattcctgcccatgaacaaccaatcaaccacttctcagttccacatcctgctgttgggtctctagtggtgacactgtaactcccaggtcatagtggtgacactataacacctagctaaattgatgccttgtctctaggaggccatgggctcctgcaggtctcatctgactctctgtagccttccctgacaatgctcacaatacccaagccagagccacattgacagcaagctgctctcatcttacctttgccagacctggccactggaaaaggctgaccctcatcctgcaatgcctatacctccaacctttgtctcaagctggtgtcctggagggacttctaagcagaaaacagattcagactcccatcctctcctgaatggcctcatatccaattctcagaccctcagccttcattgtaaggacacttcatccatgcccttgagtattctgtctgcactgtgtattctgcaatagattctcctccctctgcgaccctcaactccttccgcagactttttgttttcttgatcatctaccatagtcttccactgggacactgccaagcccattctggagagtgagttgtgcaagtacactgccccccatctacctttcgggaggtgtatacacccttctttctcccaggtctggaggctttctattttcatcctgaggcatctccacctgctcttggattcttcaaattgacaaccaccagttaacaagaactatgtgtcaccaaatagccaaacaatggcaattacaaaaataaaattaatagctgtaacccccattagcaaggatacacaaatcaaatcagggatagtgggtgaggaagtctgcctaacattcaaggaaggattctgaagtgatacaaaatcattgcctttgctatctttagaatggacactttcagccaggcacagttgctcagcctgtaatcccagcactctgagagccccagttgggtggatcacttgaggccagcagcttgagaccaccctgggcaatgtgcagaaaccccaactctactaaaaatacaaaaatagccagttattgtggcacatgcctgtaatcccaactccttgggaggctgaggcacaagaatcacttgaatctgggagccagagtttgtaatgagcgaagatcatgccactgcactctagcctaggcattagagtgataatctgtctgtggaaaataaaaacattcctcttcaaagttttcttctttaaatcataaatgttggaattaatatatcctctttgaaactcactttcttcaagcttctttatttgatggtagtaaatctttgttaagctttatgaggcaagagtaatggaagaagcatattatatatatttatactctaacctcagtgcttgttctagcaagctcaggcatgcgtgaatgtgcccaggcatgttccagcccataccttatatcctttccttattgggaaatgctgttactcctataagcattcttgtaagcaacttcctctttttctttgtctccactatctttacctattgaggacagttttaggttcttagccagttggatgtagcatagactgtgaggtccaaccccagccaatggagatagcacacagcagtagcgacctcatgcttaacagataaatattcctgtctccctttgtttggggtgctctcagctgatgagcaacaccctttctaaagaaattaaagttgtcttgctgagaaaacttttggtctaaatgctgattcttccttgcagcactgaagaagaagcaattatttccaacactttctcatacacaaaaaaagaagaaggtggaagaaaactttcttgtgcaccctatccctcactcagaaagacaacagaaggctcctagtggcaagccctagaggattcatttcttttgggaaccctcttggctgggatactaggactcaggtcaaactcagcattttcagtgtgtgggaagtgtgcttgggtttcactgttacttccaataatgtgatttggtccttggggttcaccaaattttggtatggagtggtgaaccctgttaagtttaagtgtctataaaattaacaaagcaaaataaccattctgccccatggttcagagaccaaatattgtgtaggaaatgctttagcgagagaaacagagaagaataaaaaatgtcctcaagcgctgcattatttcttgttatcgtccagatcttagaggaaaggctttcattttccctcattcagtatgatattagctgtgcatctgtcatttatggcttttattatgttggggtatgttccctgtgtatgtagttttttcagggtttttgttatgaagtgatgttgaactttatcaaacgtttttcagtttcagttgaaacgatcatatgctttttgtccttcattctcttgatatgatgcatcatgttgatgatttccatatggtgcactgtccttgcatcctgggcatgaattccacttgatcatgacaaatgaatttttaatgcattcttgaattccgtttgctggtattttgttgaggatttttgcatcaatattcatcagagatattggcctgcagtttctttttttttcttttttctttgttttgttgtttgtttgtttgtttgttttgatgtgtctatgtctggttttggtatctgggtagtagtgttccatccccttttattttttagaataatttgaataagactggtgttggttctttaaatatttggtagaattccgaagtgaagtcattgggccccgggcttttctttagtggaaggctgtttattatggcttcaatctcgttacttattattggtctattcatgttttgaatttgttccttatttaatcttggtaggctgtgtgtatctaggaatttgtccatttcttttagattttcaaatttattggcacataattgcccattgtagcctctaatcgtcatttgagttcctgcagtaccaattataatgtctccttcttcatttttgattgtatttatttggatcctgcccctttttttcttacttaggctgcctaataatttcttaattttgttgaactttttcttttgtttgtctcgctctgccaccaggctggagtgtagtggtgtgatcttggctcactggaacctccgtctcccaggttcaagcaattctcctgcctcaccctcccaaatagctgggactacaggcaagtgccaccactcccagctaatttttgtatttttagtagacacgggttttcaccatgttggccaggatggtctcgatctcttgacttcataatccacctgcctcagcctcccaaagtgctgggattacaggcatgagccactgcgcccagcctaattttgtttaaattttcaagaaatcaacttcttctttcattgatttctgtattttttatttccattttatttatttaaactctaagctttattctatcttcttctcattttagctttggtatgcttattgcctctctagctctttaatgtgcattgttagattgtttatttgaagttcttcctctctacaccataagacgtaagcatgtcctcattatgtcataagatgtaaccacttacagctataaacttccttcttagttctgcttttgctgtatctcataggctttgttatgttgtgtttccattatcaattgtgtcagaaatttttcaatatttttcttaatttcttcattgagcaactgatcatttgggagcatatttttaaacttccatgtacttacatagtttccaaaatacctcttgtgatcaatttctagttttattccactatggttcaagaagatgcttgatattatttcaattttttttcacattttaagatgtgttttgtgacctaacatatggtctactttttttttttattaaactttaagttgtggggtacatgtgtagaccgtgcagttttgttacataggtatacacgtgccatggtggtttgctgctcccattaacctgtcatctacattaggtacttctcataatgctatccctcccctaacctccaccctctgacaggacctggtgtgtgatgttcccctccctgtgtccatgtgatctatttttgagaatgatccatgtggattagaatgctgtggaaaagactttggattcctaatatccagggagggagacgatgatattactttcaatatcacacgggtgtacacactctctgtgacattgttcctaatatccagtggaagagaggatgatataacacccagggagggagaggatgatattactcttaatattgcagggtgtgtacccatgcctatgatattgttcctaatatcaggagggggagaggatgatattactcagaatatggcagggggtgtacacacactctgtgacatggttcttaatatacaggggagaatgggacaatattactctcaatatcgcagggggcgtacaaccctgtgatttgttcctaatatacaaaaggggacagtatgatattgttcctaaaatcgcagaaggtgtacaacgccctgtgatattgttcctaatatccagggcgggagaggatgatattacccccaatatcacagggggtgtgcactttccctgttacattgttcctatgatccgagtggggggaaatgacattagtcccaatatcgcaggatgtgtacactactcccccatgatattgttcctaatatcaagggggagagaggaggatattactcccaatatcgcaagggaggtacatcctccatgcaatattgttcgtaatattcaggaggagagaggaagatattactctcaatatcgcagaaagtggacacccaccctgtgatgttcttcataatatccagggaagcagacgattatatgactttcaatatcgctgggagtgtacatcccttttgggatattgtttctaatatccaggaagggagaggattatattacttccagtattgcagccagtgtacacatttcttgtgatattgttcctaatatccagaaagggaaaggatgatattactcccaatattgcaggtggtgtacacccccctctgatattgttccttacatcaaggaaaagaaagaagaatattactcccaatatcgaagagagtgtacacccctcctgtgatattgtatttaatatccatggggaaagaggatgttgttactcccaatatcgcagggggtttacacccacactgtgatattgttcctaaaatccagtgaaggagaaaataatattgctcccaatattgcagggtgtatacaggccctcccccgttatattgctcctaatatccagcggtggagaggatattactttcaatttttgcagggagtgtgtaccccctctctgatatttttctaatatcaaggatgggaaaggatgccattactcccaatatcgcaggaggtgtacatgccctgtgatattgttcctaatatccagggaggtagaggatgatattactttcaatattgcaggggctgtacaccctctatgatgttgttattaatatttaggttgggagaaaatgatatttttcctaatatcctgggaaggaaaggatgatattactgtaaatattccagggagtgtacaccttcctaatattctaatattgttcctaatatccaggggtgggagaggattatattactcccaatatcgcagtgggtgtacacccctcctgtgatgttgtttctaatatccaagcgaggagaaaatgatatcactctcaataccgcagggggtgtacaccttccccatcatatcgttcctaatattcagagggaaagaagatgatgttactttcaatatcgcaggggttgtacacaacccctgtgatatttctcctaatatccaggaagaaagaggatgatattgctcccattatagcagacggtatacgcctccctgtaacattgtttctaatatcaagactgggagaggatgatatcacttccagtatcgcaaggggtgtacacctcccccgtgatattgttactaatatccagggggaagaggataatattactttcaatattgcaggggctgtacacccccgtgatattgttgttaatatttaggttgggagaaaatgatattagtccaaatatcgcagagagtgtacacacttccgataatattgttcttaatatccatgggggagacgatgatattacacccaatatcgcagggggtgtagtctccccttgtgatattgtccctaatattcagggaagtaaacgatgatgttagtgtgaatattccagggagtgtacaccccctttgtgatattgtcctaatatccgcaggagagaagataatattactcccaatatcgcagggggtgaacacaccccctgtgatattgtttctaatatccaagcgaggagaaaataatattactcccaatgtctcaggggatatacaccttccctatgatattgtttctaatattcaggtggaaaacgggtgatattactcctaatatccaggaagaaaggggattatgttactccccttatagcagggggtatacacctcccctgtaatattgttcctaatatcaaggctgggatatacgtggggggaaggatgatattactcccaatatcacaggggttataaaaccttctgtgatattgctcctaataaccatggcggaagaagatgatattactcctaatattgcaggaggtgtacactcccccattatgttgttcctagtatgcagaaaaggagaggatgacattattgccaatatcgcagggtgtgtacaccacccatgatattgttcctaatatttagagggacagaggatgatattactcccaatatcgcagggggtgtacacgcatcccctgtgatattgttcttgaaatcgaggggaaagagaattatatttctctaaatattgcagagggtgtacaccgccccctgtgatattgttcctaatagccgggggcggggggagataattaaattactttcaatatctcagagagtgtacatcccccttgtgacattgttcctaatatccagagcaaaagagaatgatattcctcccagtatcgcaggaagtgtacatttaacctgtaatattgtttctaatatccagggggaagagaatagtaatactcccaatatcgtaggggttgtacaccttttctgtgatattgttgcaaatatttagaagagagagagaatattactcgcaatatcacagggaatgtatacttcccctgtgatattgttctaatatctagaaaaagagaggataatattactcctaatattgcagggggtgtacacccccacttgtgatattgttcctaatataaaggaaggtcgaaaaacaaacggggagcccagggggaaggaaggcaggcgaggaagaggcagcgccggggcgccggagggagcagccgggccgcggaagcgcgagcacgagaccggtcgcggtcgcagtcgcatttttgccgttgtcgcggccgccgccgccgaggcttacccggggatgtctgagcccgcgcctcgcggcccccaagctccacgctgcgcccgctgtcccggcctctaagggccgccacgtccctgcggcgcgcgcaggcagaaagcggcttcgtgccggcggagggggcccgggcgggccgggaaaggctgccccaggccccgcgcctaccccatcaccgcggccggcgccgggccgggaggatgagcggtgtggggctctgaagcatggagggggttttgtacaagtggaccaactatctcacaggttggcagcctcgttggtttgttttagataatggaatcttatcctattatgattcacaagatgatgtttgcaaagggagcaaaggaagcataaagatggcagtttgtgaaattaaaggtgacagctttggaggggaccacccttgattggatacataaattctgttcattcagcagacaacacaagaatggaattaatcattcctggagagcagcatttctacatgaaggcagtgaacgcagctgaaagacagaggtggctggtcgctctggggagctccaaagcatgtttgactgatacaaggactaaaaacgaaaaagaaagaagtgaaaccagtgaatcgctgaaaaccaaaatgtctgaacttcgcctctactgtgacctcttaatgcagcaagttcatacgatacaggaatttgttcaccacgatgagaatcattcatctcctagtgcagagaacatcaatgaagcctcttctctgcttagtgccacgtgtaacacgttcatcacaacgcttgaggaatgtgtgaagatagccaatgccaggtttaaacctgagatgtttcaacggcaccatccggatcccttagtttctcctgtgtcaccttctcctgttcaaatgaggaagcgttctgtcagccaccctggttcttgcaccagggaggagtagccactgtataaaagaaccagtatctgcacttcaccgactctcccagcgacgccgaagaacctactcagatacagattcttgtagtgatattcctcttgaagacccagatagacctgttcactgttcaaaaaatacacttaatggagatttggcatcagcaaccattcctgaagaaagcagacttatggccaaaaaacaatctgaatcagaagatactcttccatccttctcttcctgaagaaactgtagtgtccaactttctctaagtattgctatgcaaaagctgctgtaattgaactattgttatagggagtagttttttcccttaggactctgcactttatagaatattgtaaaacagacaaacaagaaaacaaaccacatacttttgaagcgtgttttatctttatatagtttgtttgcaagagtattttcctaataacttcacagtatgaatgtgcatcttttttttctttttttaacaaatgatggtgtaacattttgacatccataaggacaaatgtagatatttttctaaaaaaccgtgaggggactgacagcttggtcagggtgtattgtagcttataaacatgaaatcttacaaggtttcagtttgacagaagtgtgatatatgtaacttgtgccatggaccaaatggtcactttaccacagctaaaaatgagttatgatagcagcttgatggtgattgcattgtattcctttaatcaaaaaggaaacgcaatattctaagtatctttagcccaaataccatgacatattgagcatctttaaataaccagactgtattgtccttcatatgtgaagttgacactactgatttgtcaataccaaattttgggttaaagtgtttaatttttatttatttattttcttgttgcctcaaaagatgattgcattctaacttttgtgacctaccaaatttaagatgtgtatacattgttctttacgttgttctagaaaagagattttaatgctgtagtgacttagctcacttacatcagagaaataaacaactttcaatggaaaaaaatatatataaaggaaggaagaggatgatattacttctcatatagaaggggttgtacaccccccttgtgatattgttcctaatattcagggagggagaggattatattactcccaatatagcagggagtgtacacccccccccccgtgataatgttcctaatattcagggaagcagaggatgatattactttcaatatcacagggggtgtgctgtccccctgttatattgttcttaatattcaggggggagaggatattattatgcccgatatcacaggagaagtacaccccacaagtgatattgttcctaatatccaggggtaaagaggatgatatcgcaggtggtgtacacccctccccgtgatattgtttctaatataaagaaggagagagcatgatattactcccaatatcgctggaggtctacaccccccttgtgatactgttcctaatatccaggaagggaaacaatgatattgctgtgaatattccagggggtgtacacccctttgtaatattgttcctcatatccagggggtagagaggatgatattactcccaatatcgcagggggtgcacggccccactgtgatattgtttttcatatccaggaggggagaggatgacattactctcaatatggcagggggcgaacaccccctgtgatattgtgctagttaggttgggagaaaatgatattactcccaatatcgcagggggtgtacaccgctcctgtgatattgttcctaatatccatgacgggagaggatattactcccaatatcgcagggggtgtacctctcccctgtgggattgttcacagtatccaaaagggaagaggatgatgttactcccaatatcacagggagtgtacaccaccattgtgatattgttcctaatagccagggaagaaaacgatgatattattgtgaatattacagggggtgtacacaccccctgtgatatggtttttaatatacaggttggaaaaggatgatattactcccaatatcacaaaaggtgtacacacccccccatgatattgttcttaatacttcggtggggagaaaatgatattagtctccatatcacaggggtgtgaactcctccggtgatattgtttttaatatcaagaggggaggagatgatattgctttcaatatcgctgggggtgtacatccctcctgtgatattgttccttatatccaggcgaggggaaaataatattactcccaatagtacacaccccatgtggtattgttcctaatactcagggggaaagaagataatattactttcaatatcacagggtttgtacacctttcctgtggtatagttttcaatatccagggggaaggtacatgatattactcccattgcagcaaggggtgtacacacctcctgtgatattgttcctaatatccagaagtggtgaggatgatattactcccagggggtgtacaccccacctatgatattgtttctaatatccaggggaaaagagtgtgatattatgcccaatatcgcagagggtgtacacttatcctgggatattgtttctagtatttggggagggaggagaggatgctattattctcaatatcgcagaaattgtacacccccgctgtgatattcttcataataatcagggaaaaagaggatgatattactaccaatattgcagggggttacacttcccctttggtagtgttcctaatatccaggaagaaagaggatgatattaatcccattttccaggaagtgtacacccaccgtgtcatgttgttcctaatatccagcagggaagaggatgatattactcccaatatcggagagggtgtacacttcccctgttatattgtttctaatacccagggggaagaaggatgacattactgccaatatcacagggtgtgtaccccaccctgctattgttcctaatattcaaaaggaaagatgaaaatattactcccaatatctcagggtgtgtacacctctcctgtgatatcgttcctaatatccacaggaagagagaatattactctcaatattgcaggggggtgtacacccccctgtgatattgttccaaatattcgggcggggagaggatgatattagtcccaatatcgcagggggtgtgcaccaacctgtgatattgttcctaatatccatgcgggggaggacgatatcactctcaatgtcgcaggaagtgtacacctctcttgttatatttttcttaatatccaggagggaaaagatgatattactgccaatatcgcagggtgtgtccaccccccttttatattgttcctaatatccaatggaaaagaggatgacattgctctccatatcccagaaggtgtacaacgcccctgtaatattgttcctaatattttgggggaagagaggatgatataacttataatatcacaggaggtgtacaccacccctatgtattgttcctaatatcctttaagggagaggatgatattactcccaatatctcaggtggtgcctattccccctgtgatattgtttttaatatccaggggaagagagtatgatattacgcccaatatcgcagggggcatacaccctctctgagatattgttcataatatatagagggagagaggatgatattacttccaatatcagaggtggggtacaccccccggttatattattcttgatatccaggaggggagaggttgatattactggatatatagcagggagtgttcacatcttctgtgatactgttcctaatatccagaaaagtagaggatgatattactcccaatatcgcagaacgtgtacacctccctgtgatattgatcctaacattcaaaggggagaggatgatattactcaaaacatcacagggcatgtacactcccctgtgatattgttcctagtatccagaagggagcaagataatattactttcaatatcgcagggggtgtacacccctctttggtatgtttcctaatatccagaaggaaagagggtgctattactttccatattgcaaggggtgtacacccccctgtggtatggttcataatatccagggagggaaagggtgctattattccccatatcgcgaggcatgtacaccctgctgcggtacggttcctaatatccagggggaaagaggatgctattacttcccatatcgcggggtgtgtacacccccgtgtggtatgttttgtaatctccgggaacgaagagggtgttattacccctcatatcgctggaaatgtacactcccctgtggtacggttcacaatatccaggggattgagggtgctattactccccatatcgcggggggagtgcacctccctgtggtatggttcgaaatatccagggtaagagagggtgctattattccccattttgcaggaggcgtacacccctctatggtatgttttgtaatatcccaggtaaggggtgctattgagagaagagagcaaaagaccccccccatattgttctgtattattttatactcagtacctgttttaagaagaaacaaggaagcgaaaccaaaggcaggcagcccggcgccaggcaccagatccaaaaccagacccgaaaccaggcctgggccttcctgaccttagcctgaaagttaaaattcaacccatgacctagcaactgatgttatccatagattccagacattgtatggaaggacattgtgaaatttcttgttctgttctgtttcactctgagtactggtgcatgcagcccttgtcacatacccactagattgctcaatcaatcatggccctttcatgtaaaaaccttagtgttgtgagcccttaaaaaggacagaaattgtgcactcaacaagcttggattttgatactctagtctgctgatgcttccagctgattaaaagccacttccttcactacctcggtgtctgtgggattttgtccgcggctcctcctgctacactgtgactccccttatagagaggggtgtacacccccctttggttcctaatatccagcgggggagtaggtgctattactccccatattgcggggagtgtacacccccttgtagtacggatcgtaaaatcaaggagggagagaaggtgtaattatccccatatcacagggagtgtacacccctttgtggtatagtttgtaatatccacgacgggagagaatgctattactccccatatcgtggagggtgtacaccgccctgtagtatggttcgtaatatccggaaggggagaggttgctattactccccatatggtgggaagtgtacacccccatgtgatatggttcataatatccaggggggtagaggatgatattacccacaatatcatagaaggtgcacacccttttgtgatattgtccataaaatccagaaggggagaggatgatattacttccaatatcacagggggtgtgtagccccatatgatattgtttgtaatatcaaggtagggagaggatgctattccttacaatagctcaaggggtgtaaccttcttgtgatattgtttgtaatatccagaaggggagaagataatttttttattttaaaagtaaactttaatgtcaaaaatgcaaacttgagaagggcagaaagatcaaacagaaggctgccacttcacaattggagggttgcacagtggccgggcagaggcgctcctcactccccagacggtgaggcagccgggcagaggtgctcctcacttccgagatgttgcaggagccgggcagaggtgctcctcacttcccagaacagggggctgccgggcagaggtgctcctcactgcccagacggtttgcaggcctggcagaggcactcctcacttcccaaacggagcagcggcaagccagaggcgctccacacttcccagatggtggggcagccgggcagaggcgatcctcacttctcagagggtagggcggcccagcagaggcgctcctcacttcccacatggtggggcggcaggctagaggcgatcctcacttcccagacggtggtgtggccatgcagaggtgctcctcacttcccagatggtgtggccgccgagctgaggcactcctcacttccctgacagtggggcggctgggcagaggcgctcctcacttcccagacacttggactccgggcagagactctcctcatttcccagatggtggggctgccgggcagaggcgctcctcacttcccagacggttcagaggccgggcagaggcgctctggggagaggataatgttactcccaatatcgcagggggtgcacactccctgtgatattgttccgaatatccagagggggaaaggatgatatagctcccaaaatcgtggggagtgtacacccccctgtgatcttgtttgtaataccaagaagaaaagagaatgctattatttccaatatagcagggggagtacaaccccctgtgatattgttcgtaatatctagggggagagaaaattatattagtcttaatatctcaggggacgttcatccccctgtaatattgttggtaatattcagaatggagaagatgatattgttcttaaaatacaggaaaaaatatgataatattacttccaatatcgaagggggtgtacactctcctgtgatattgttcccaatatccagaatgaaagaggatgctattactcccaatatcccagggagtgtacacccctttgccatattgttcataatatccaggggaagacaggataacattactcccaatatcaccgggggtgtccacccactagtgatatttattgttcatcatatccagaaaaggagaggatgatattactcccaatattgcaggtggtgtacggtccctgtgatattctttgaaatatctagaaaaggagaggatgatatcactccgagtatcacagggggtgtacacccccctgtgatattgttcgtaatatccaggggagaaaaggatgatataattgccaatatttcaggggatgtgcacctccctgtgatattgtttgtaatatccaggggtggagaggatgatattactcaaaataacgtaaacatcctgtgtgtacatcccctgtgatattgtttataatatccaggggggtagaagatgacattacccccaatatcacagagtgtacacacccctgggatactgttcataatatccaggcgggaaagaatgaactacttccaatatcgcaggatatgtacacccccctgtgatatatttcctaatatttatgtgggtaaggatattacccccaatatcacagaaggtgtacatcctctttgtgatattattcctaacatccaggaaaggagagaatgatattactcccagtatcgcagggggtgtacaccacccctgtgatattgttgctaatatccagggggagaggataatattactcccaaaatcacaggggacgtacactcctcctgagatattgttcctaatattcatggggaaaagaatgctactactccaaatacagcagagggtgtacaccatccccgtgatattgttttttatatccaaagggtgaaaggctgatattactcccaatatcgcagggggtgtacaggccccccatgatatcattcttaatatccagggaggcaaagaatgatgttactcccaatattgcaggctgtatacaccccccgtgatattgttcctaatatccagagtaagagaggatgacattgctcccaatattgcaggggttgcacgcacgccctgtgataatattactcccaatatcaacagtgggtgtacactcctcctgtgatattgtttgttatatctaagaaagaagaggatgatattactgtcaatatcacagaaggtgtacagccccttgtgatgttgtttctaatatccagcggtgagaggatggtattactcgcaatattgtagggggtgtccaacggccctgtgatattgtttctcatattcaaaaaggaaaagaataatataactccaaatatcgcagggtgtgtacacttccctgtgatattgatcctaatatccaggaagagagaggatgatattaatcccaatatcacagggggtgtacatcgcttctgtgatattcttcctaatatccagggggggaggggatgctattactcttaaaatcgcagggaacttacactcccactatgatatttttcctaatatccaggaagggagaaaatgatattactcctaatatcacatatcacaatgggtgtacatctccccgtgatattgtttctaatatcaaggatgggagaaaattatattactctcaatatcgcagggggtgtgcacacctcctgtgatattgttcctagtatccagcggaggagatgatattactttaaatattgtagaaggtgtacaacccccctttgatattgttcctaatatccagggggaaaggagatgatattactcctaatatcgcaggggctgtacaaccctatgtgatattgtttcttctaatatccaggggtggagaagataatattactcctaaaatcgaaggggacatacactccccctgtgatatttttcctaatatccagaaggaaagaggatgatattactcctaatattacaagaaatgtatacctgtcctgtgatattgttcctaatatccagaggggtaaatgattatattactcccaatatcgcaggggtgtacaccttccctgagatattgtttctaatatgcagtggaggagaggatggtattactcccaacatcacaggagatgtaaactccccttgtgatattcttcctaatgttcaggacgaaggagggtaatattactcactgtattgcagcagggggtgtagagccccctgtgatattgtttttaatattcaaggttggagaaaataatattccttccaatatcgcatggggtgtacacccttctttttatatagtttctaatatctggggggagaggatgatattactcccaatatcgcagggggattacacccccactgtgatattgtttttaatatccagggtgggagaggataatattactccaaatatcccagggctatacaccctccgtgtgatattgtttctaatatccagaggaagagaagatgatattactcccaatgtcacagggtgtgtacaggccttctttgatattgttcttaatatccatgagggagaggatgatattactcccaatatcgcaaagactgtacaccctttctgtgatattgcttccaatatccagggagggagaggatattacactcaggatcacagggggtgtacaccccaacctgtgatattgtttctaatatctagggaaaatgagggtgatattactatcaatatcacaggaggtgtacactcccttatgatattgttcctaatatccaggagaatgacaggataatattactcccaatatcgcgggtggtgtctccccccactccgtgatattgttcctaatacccagagggggagagaatcatattactcccaatatcgcaggggatgtacacctacatccggcggagtagaagataatattactcacaatatcgcaagaagtgttcaccttccctgttatattgttgctaatatccagggagtgagaagatgatattactttcaatactgagcgtgtacactacccctgtgatattgtttctcatatccagtagaggagaaaatcatgttactcccaatattgcaggggtgaacacctcctttgtgatatttttcctaatatcaggaaagggagagtatgatattacccttaatattgacaggggtgtacacccccctttgatattgttccaatatccaggggggcagaggataatattattcccaatatcgcagagggtgtacaccccccgtgatattgttcctaatatccagagaaataaaaaatagtattatttccaatatcacagggcgtacattttccctgtaattttgttcctaatatctggggggtggggtggcaggataatattactctcaatattggagagggtgtacacccccctgtgatattgttcctaatattcagggtgggagagaatgatgttactcccaatatctcaggagtcgtatacacccccttgtgatattttttctaatatccaggaggcagaggatgatattgctcccaatatcgcagggggtatacacccgagctgtgatattgtttctaatatgcaatatgggggaaggatgattttactttcaatatcgcagggaatgtacactttccttgtgattttgttcctaatatccaggggtggagaagatgctattactatattactcctcatatcgcaggcggtgtacaactccctgtgatatggttcagaatatccagagtgaaaaaggagggtgacattactcccaatatcgggggggtgtacacccctttgtgatgtggttggtaatatccaggggggcagatgagggtgatatcactccccatatcgtggaaggcgtccacttttttgtgatgtggttctttatatcccgaggggagaaggtgatattactccccatatcgcgaagggcatacacccccctgtgatatagctcataatattccggagagtggaggaagatactatgccctatatcgcgggtggcctacaaccccctatggtttggcttataatatccaggggggagagggtaatattgctccccatattgtggagacgtacagccccctgtgatatggtttgtaatatctttggggggcgagggtgatattactccccatatcgcggggagcatacacccccgtgatctggttcatagtatctcaaaggaagaagttgatgtgtacaacttaagggaaaaagttgaagtgaagtgtacacacgccctgtgacgtggttcataatatccaggcgggggagaggagagtgatatttactccccatatcgcgggtgttgtaaactcccctgtgatatagttcataatatccaggggagagaggagggtgatattgctcctcatatcgcgaagggtgtacaaccccctgtgatatggttcataatatccagaagggtagaggacgatgatattactccacatatcttgggaggtgtgatatggttcgtaatatccagcgatgagagaatgatattactccccatatcgcaaaaggtgtgatagggtttgtaatatcctgagggggagagggtgatattaatccctatattgcagaaggactacaccctcccatgacatggtttgtaatatcccagggggtagagtgtgatattactttccatatcacagggggtgtgatatgattcgtaatattcgaagggggagagggtgacactactctccatatcacggggtgtgtgatatggttcttaatatcccaggggttagaggttgatattaccccctttttggggggtgtgtacaccccctgtgatatggttcgtaatatcccgggggagacagggtgacattattccccatatcgaggggatcgtacaccccctgtggtgtggttcataatatccctagggggagatggtgatattactccccatatcagggggcgtgcactcttctgtggtataattagtaatatccagggggcagaggtcgatattcgtttccatatcatgaagggagtacacttccctgtgatatggttcctaatatccaggggggagagggtgatattattccccatattgcggggggacatacaacccctgtgatatggttcataataaccagaaaagaagagggtgatattaatccccgtattgcagagggcatacaccccccctgtgatatggtttgtaatatctaggggaggaaaaggtgatattactttccatattgctgggtgcagacacccctttatgatatggttcataatatccaagttggagagggtgatattacttcccatatcatgggaggtatacccttccctgtgatatggttcgtaatatccagaaggggagagattgatattactccccatattgtggggggcgtacaccttcctgtgatacggtttgtaatatctaggggatatagtgggtgatattactcaccatatcacgggggttgtaacatggtttgtaatatccaggggaggagagggtaatgttactccccatatctcggggcatgtacaccctcctgtgacatggttcgtaatatccaggtcgggagagggtgatattactcctcatattgccgggggtgtgttatggttcataatatcctggggaaggaggctgctatcactctccacatcttgggggatgtacactctcctgtgatatggttcataatatccagggtgggtgagggtaatattactccccatatcgcgggaagtgtacatacccctgtaatattgtttgtaatagaagagagggtgatattactccccacatcgcgggtggtgcccacccccctgtgatatggtttggaatatccagggggatgaggagggtgatattactccccatatctcggtgggagtacatccctctttgatcaagttcataatatccaaaaggaaacaggagagtgatattactccccatatcgccgggggtgtacacgggagggggagtacacccccggcgatatggtctgtaatatccagggaaggagaggagggtgatattactcaccatatcgcaggtggtctacatttacctgtgaaacagtttgtaatatccagggggggaaatgagaatgattttttttttttgagtctcactgtgtcacccaggttggagtgcagtggcacgatcttggctcactgcaacccccgcctcctggactcaagcaattctcctctcccagcctcctgaatagctgggactacaggcgcaccccacaacgtctggctaatttttgtatttttattagagacggggtttcaccatattggccaggctgatctcgaactcctgaccctgtgatccatccgcctcggcctccaaaagtgctgagattacagatgtgagccaccacgcatggcccaaggagaacgatattactccccatatcccagggggtgtatatccccctgtgatatggttcagaatatccggaaggaaagacagggatattacttcccatatcgcaaggggtgtgacatggttcgtaatatcccatgggggagagggtaatattactcttcgtattgtgaagggcatacactcccctgtgatacagttcataatattccggggagtagaggaagatattatgctccatatcgcgggtggcataagccccctgtggtttggttcataatatccagggaggagagggtaatattactccccatattgtggggacgtacaccctcctgtgatatggtttgtaatatcccagaggggagagagtgatattactccccatattgcagggacatacacccccctgtgatatggttcaaaatgtcttttttttttgaaggactggttctttatttcaaaaagacacttgtcaatattcattatcaaaacagttgcactattgatttctctttctcccaatcggccccaagtagaccacatcaaaggagagtacatattaagccaataagctgtaggatgtacacctaacagacctcctagaaaccttaccagaaaatggggacagggtagggaaagaaactttaaaagatcaacaaactgccagcccacggactgcaggggctgtcacagccagatggggtggccagggtgccacaaacccaaagaagcaaagtttcaaaataatataaaatttaaaaagttttgtacataagctattcaagatttctccagcactgactgatacaaagcacaatgagatggcacttgtagagacagcagcttcaaactcagaaaagggtaatgagatgagtttcacatggctaaatcagtggcaaaaacacaatcttctttctttctttctttctttcaaggaggcaagaaaagcaattaagtgctcacctcaacataaggggaacatgatccattctgtaagcagttgggagggggtagagatggaacaaaattttggtctcagaggtcttgccatcttaatttggtcacttctaatgaaaaaaataaaaaatagaaataacattatccaaaggtatcttaaagctgaaaacttgaacagcacattttttgttgttgttgtttggctaactcctcctggaaccacctttctggcttagctagtactttgtacagagcaatgaggcttcccatagtggagtctccctgggctctgtttggctctcagcaaggcaggcctataccttttcctctcctccatggagagaggaatatgcattaaggtgaaaaatcaccttccaaaagtgagaaagggattcgatcgctgcttcagggctgtggtattatatggaatgttttacaaaaggttgctacaaaacaacaaaagaggtaattacaaaatgtgtacatcacaacatactttttaaagacattatgcattgtgctcacattcccttaaatgttgtttccaaaggtgctcagcctctagcccagctggaatctccgggaagaggcggacagtttggtgaaaaagacacagggaaggagcgggcggcggaaggagggggcggcgaaaggagaaagcagccttccagttaaagatcagccctcaattaaaggtcagcttcgggcaggctggcctcaggcggagtctggttcagagggaggagcagcagcagggtgagactgaggcgttctacatctcattcaggtcaagcagagtctggtccagcatcctttgtgtacagaggtgctcccctttggtgcatttcagtttatcttccaagtcatcaattgtcttttccagcttggctaccgatctctcagcaaactcagcatgggtctccgcctcctttattttatcagtaagaatcttgatctcttcctcatatttgtcttctttttgagagtacttttcttcagcagcactcagacacttcaggttctggtccatcagtctaatctgctcatccatctctcggcaaagggattctgccagctcagctcgttcctctgtgcgttccaagtctccttcaatgatcaccaacttacgagccacctcttcatacttcctatctgcctcttctgcaatgtgcttagcttctctgagttggatttcctggagttccatcttttcttcatcttttaaggcccggttttcaataaccttcttacctctctcactctcatcagcagctttttccgcttcttccagcttttgcagggcagtagccaggtgctcctgagcacggtccagctcctcttcaaccagctggatcccacgttcaaggaggccacctcagcctcagcctgttcccgggcccacctttctccctcaacttctcgctggaggcgctcagctcgctcctctgcatcatctgcctgctgctgcagaacctggatcttgcgcttcaccgcctcgatggtggtgatcccagccatggtgcccacccagctactgctagagctccggttcctgcctcctccgatcggcgttgcagcctcctctcacccttacttccgcctcggttcaaaatatcttaagggaaggagttgatattactccccacatcacgggaagtttacatcccctggtgatatggtttgtaatatcccagggtggatagggtgatattactctccatatcgcgaaggagtactcccccctgtgatatggttcataatatccttggggggagagtgtgatattactccccatatcgcgagggccatatactcctttgtgacatggttcgaaatatcccggtgggggagggggtagagggtaatattactccccatacagcgaagagcatacgcccttctgtggcaaggttagtaatacttcagggaaaagagtgcaatattacttttcatattgcagggaacatacactcccctgtgacatggttcgtaatatcccgggggctgagagggtgatatttctccccatatcaccgggggcctacacctgggtgtgatatggctcataatatacagggagggagagggtgatattactccacataccgagtgaggggttacacaccctcgtgacatgttcgaaataccccaaggaggagacaatgatattactttccctgtcgcgggggctacaccctcccagtgatatggttcacaatatcccggggtggagagggtgatattactccctatatcaccggggggtgtacacttccctgggaaatggtttacagtatccccggggggagagggtactattactccccatatcacgttacatatcagggtacacccccacgtgatatggtttgtaacatcccaggaggaagaaaatgatattactccccatatcgcggtggcatacacccctccccgttaaatggttcataatatcttggggtggagagggtgatattactccccatatcacgtggggcatacaccccactatgatatggttcataatatcccggaggggagagggagatattactctccatgtcgcggggggcatatacacccctgtgatatggtttgtgatatcccgggggcggagagggagatattactctccatatcgtggggtcgtacacttttctgtgatatgattcgtaatatccagacggggagagggtgatattacttcccatattgcgggggcgtacacccctctgtgatatggttcataatatcccgaagaaaagagggtgatattactcctcatatcgcggggaacacacaccaccctgtgatatggtttgtaatattcagcgggggagagagtaatattactccctgtatctcggatggcgtacactcccctgtgatatggttcataatatccagaagaaaagagggtgatattactccccatattccagggaatgtacaccaccctttgaatatggttcgtaatatccaggaggggagagggtaatattgctcccaatatcgaaggaggtgttatacggttagtaatatccagagaaggagagggtgacattactccccacatcgtggtgggtgtgcacccacctgtgatatggttcataatattcaggttaagagaggtgatattgctttccatatcgccaagggtgtacactcccgtgaaatacagttcgtaatatccaaaaggggagagggtgatattactcccatatcgtggggggtgtacacccctctgtgatatggttcataatatccagggtggaataaggtggtattactccctgtatctcggggcatgtacatcgcctgtgatatgattcataatatccagaagaagagagggtgatattaatctccatattgctgggggtgtacaaccccctgttgtatggtttgttacactgagttggggagagggttacattactctcaatatcgagtggggcatacacacttatgtgatatggttcataatatcccagggaggagagggtgatattactccccatatcgcgggaggcatacaccccaatgtgatatggtttgtaatatctacatttttttttttgagacgaagtctcgctcttgtcccccaggctggagtatgatggccggatctcggctcactgcaacctcagcctcccgggttcaagcgattctcctgccttggtcccccaagaagttgggattacaggcgcacaccaccacgcccggctactttttgtatttttagtagagaaggggtttcaccatgttggccaggctggtctagaactcctgacctcagatgatccacctgcctcggcctcccaaagtgctgggattacaggcgtgagccactgcacctggcctggtttgtaatatctatgaagggggaaggtgatattactttccatatcacgggaggcgtacaccacgatgtgatatggtttgtaatatccagggggtatactgggtgatattactccccatatcgcggggagtgtatacccttttgtgatatggttcctaatattaagctgaggagaaggtaatattactccccatatcgcaggggtttttatatggttcataatattcaggaagagagagggtgacattactctccatatcacggggtgtgtactcccccatgtgatatggtttgtaatatccagggaaggagaggttaatattactccccatatcgcagggggtgtacacctctctgtggtttgtaatatccaaagggaagaggatgatattatcttcaatatcttggggggatacagtccccagtgatattgttcataatatccagagggggaggggatgatattactcccaatattgcaggtggtgtacaaccccctgtgatattctttataatatagagggggatgatgatattactcccaatatagtaaacaacctgtgtgtacaccccctgtgatattgtttataatatccaagggtggaaaggatgatattactcctcatatcgcagggggtgtatacccctctgtgacattgttcctaatattcaggggaggagaagatgatactactcctcatatcacaggggatgtacacccccctgtgatacttttggtaatatccaggggaggagaaaattatattattccccatgtcacagagggtgtacaccccgctgtgatagtgttcataatatccaggtgaaaagaggatgatattactccgaatatctcaggaagtgtacacccttctgtgatattgttcataatatccaaaggtggagaggaggatactactccccatatcgcagtgggtgtacacccccctgtgatatggttcataatatccaatgtaggagaggatgatattactttccatatcgcggagagtgtacatccccctgttatattgtttgtaatattcagggagaaagaggatactactactccccatatcacacggggtgtatattcccctgtgatatggttcctgatatccaagagatattataatcctctcttggattatgctacctctcatatcgcatggggtgtacacacactttgtgatatcgtttgtcatatccaaggagggagaggattatattaatcccaagatcacggggggtgtacaccctcctgtgatattgtttgtaatattaaggggggagaggataatattactcccaatataattaacaccctgtgtgtactcctccttgtaatattgttcataatatccaatgggggagacgatgatattactttcaatatcgcagaggatgtacatccctttgtaacaatgtttgtaatataaaaggcaagagaggatgatactacttccaaaattgcaggacatgtacaccccccggtgatattgttcctaatatccagtggggaagaggatgatagtagtcccaatatcgcaaagggtgtacacaccccctgggatattgttcctaatataaaaggaggagaggatgctattattcccaatatcacagaaggtgtaaaatcccctgtgatattgttcgtaatattcaggaggggagaggattatattactcccaatatcacagggtgtgtacacagggaggggcaagggccagaagcgggcgggaatccccatgtttgggcggacccagtttctaatggccagcatttgccaatcaaagcttaccagagaactctaaaagccagggctttcctgctagacaagactcatttctggaactgctttaaaaagaaacaaaacttcccaaggaccccttttcctctctgtctgcctaaaataatgttttaaaaactcctaaagcagctgaattcagcccccttcctgggggaatgtatagacggaactcccacctttcccggcatcccaaggccagagtatgtgaaactcctgggtctctatgtgtgtctgagcggctgctctgccaacactccacacagccctgtgtcctggacccaaggcccttatgacctgagctcaagaggggatctcctgatccatgggttgcaaagatccatgggagaagcatggtttctggggcggggtcacacgctcagtcactgtttccctcggatgccggagatggttcctttggctctctgccaatacagggtgaatcatcatccatccctcttttctttgttctcccgggtcaagttgtttgcctagtcagtcccaatgtgagaacctgaatatttcagttgacgcgctgacttcaaaatccccgggcttcgggaggcggagcttgcagtgagccgagatcccgccactgcactccagcctgggcgacagagcgagactccgtctcaaaaaaaaaaaaaaaaaaaaaaaaaaaaaagtccccgggcttttcttttcactcagtggaaggcagctgcttctaattggccatcttggcccgcccccaccacgtgaccttctgtaaaatgcctccactctccaggaacgctctcattatataactttgcctgaaaccaacagcacgctcattgcacatatcatgggctcatttatttcacttataaagaacctggccaaggaagagatagtgcctaaagtggccagtattctgaccgatatgttagaaaaatggtgtgccgaccaattcatgacatgtgtcccaaaactagcaacggaaattgtattcgccgtgttgaggtctctaatccagatgatgctcatctatgtactggaaaaggcagagtcctttcctgacaagctgctgaaactcttcagaaacatctcatatttcctgaagaagatgatgtctggacaagcagcacaggtcgttcagatttaactttctattcatatatccagcacgatattcgcacaattgtcacgaaaccttaccagttgatgagtcctgcacatttcctttaatttcaggaggaagagggtaatccggatgagttttctgacctactctgctgctgtgattaaacaaccaccaggaaattttgacgacactgttctcctgagctcctccctttcctccgggaacaaaacaattgaatttacaaaaataaagtgttatttgactggagtgaggtctcatgtctgcttatgcggtggctcgctgctcagaacagggtgagtctctgggttgtgtgctgaggaggggaggctctcaatctggagaaaacccactgcaggggacacctccatggggtctgagggactgaggatgaggagccggactgggtctagggaaggaggaggtttcagagggtgaaattctggcactaaagcctgggggtgtttgggaacttcctccttccgaagaagtttcagggagggataaagacaaaccctgggctccttgaggggcccttactaatttgagaggactctatcgggaaggagagtgacaatggcctccttgaggactgaggcccctgaataaatgaggcccagatacagtccatgggggatgagaccttcaagggtcacattttggttgggacagaggaaaagtgcagctctgcagccgcagaggaaaacccggcagtgtgaaagcgaccttggaggggccctgtgcgctctgaatgcgtctgagcccccatcccctgtccccgcctctctttctggattcttccagctcggctgtctccgccatcttctgagcgctccaccctgacttattcaagtttcccttctgccttccaagtactccaaaatctttcagatctgtgtccctacccctgtttttagcatgtgttggggctccaggtccctgaaggtttctggcctgaaatccacctccccagcggagtggactgcgttctagagactccacactccgcgaggttcccaggcccctgagggacaaccgagtggcctgcgcacttcagggctccacactcggcaaggtctttcaagcccttggggtccccttcttagttttttccacctttctgggctgcagtcactccataaatgctgggatctgatccccacccccactctcgtttcctcaattctgcgggctacacgctctggcaaggtcctccgggccctggatcccctccctctccctatgcccacgctcctagtcagcccttctggggtccactattttcaggaactaaccgttctcatggagccttgctaaccggaaagctgtgtggaagaaaggctttgaggatagaggtggagatttggctcttccatagtgccactcacccaccccaccatgctgccactgccagacccggacccctgtttcagaacaagtgaccagattcgctcctggacagccctggacactggccttttctctgaaaactactcaccctttctctagtccccacttcatgccagcctcataccctcttccttcccccacgctggcttccgggatcctcctctgctcagacaacctcttctgtgtcccacccccgtttttagaatgctttggggcaccaggttgggggaaggtttctggcctgatatccatctctttccaaactcccttcttcccttgaaaggcttcttgccttcagccccacttctggctccgaggtttcaggacaccctcctcttcatcctcattcttttgaccaccagctttttaggaattcgaacgtccctctcatcttcgtgaatcctgtccaggcatttgttgaccccttcatctgatacccctgacctcacattgccaaaagtctacccctacccagtacactggaattagacaaaatcccaggagttttacctcaactctgagtgtgcccacaggagctctccctgaagccacgtccttttaagcagggtctagggttcctcccttgtcttaatgaactctttgtcacacggaggacgttatggagcccttatgatctttcactgcctttctgcccagcgttttgtctttccatggacatttataatattttccatggacattttgttctctcaatgtccacccctaatttccaacatcccaaagattctcatgtgtttcctgaaagccatttacaggaatggctgtgcccagacccccttccccaggatcctccttcacacctggtaggtgcctctcctagagagatttgcactcagttgtcgtgcagtcacatggcccagatggttgttaatcacccccttcctggcaacagctagcagccagggaatcactggcacagaaacctcagggtgaccaagatgaggccacctctgtgctgaaggctgtgctccagagcctgcttgggatcaggcttaagcaggtcttcagccagacctgatgttacctggtttccttgagctgccctgcctgagctatcgggagcactccctcaatgcacatcttgattccctatctcatgctctgcttctagaaaccatgagctatcaattgctactggcaatggtcctgggaagtcaaccctaagtatggattctggggttggatgactccccacaggacttcagtgagcaacaatcactgctggcagttggaggacagagtcgctagggcatgtgaccactgtgaaaccaccgatgtttcacctggggtaattttggatgaactacggtagaagcactgaaggtacattgcttttggtttggaagattgtaggtaaataatagcgatatgaatgtggaattggatggctgcaaacgagtgccattgatgcattgaaagaggaaaagtcaggctgtcacctgtcactcagcaatttaaagtgtgagagttgggactagatgtggtggctcacatctataatccagagattcgggggaagcttgaagaggtaggatcttttgagtccaggagttccagaccagcctggacaccagagcaagacctcatctctacaacaaaattttcttaaaaattagatgggcttggtggcacgcacctgtacttgtagatctagctaatggggagcatgagataaaaaaatcacctgagtcagggacttaggggttacaatgaggtatgattgtgccagtgcacacactcccacctggccaacagagtgagattctgcttccaaaaaaataagaaataaatcaggtttgagagttggaaagcatcatcttctcctagagccaaaggacatgtacaactgagacccaggaacaaagcttcatcacaaagagaccatcatcagtggagccgggagatgcattccccctcaccctgccttgaggaggcagtggagtcatctgtctgggatcctttctgacccagccctatttgtttgtctctttggcttctttggatttgtatattttagctgttataacactgtaaaacaaacagagtgatttttttgagttgtgtgaatgatgctagctccatagtcaccctgagagtgatgggaacttttgaatttgtggcaagttggagggtagtgtaagtgacctgagattgccaaattggggctagcactggatgtgaggttaggctagtggaaaaatatgcccagaaccagaggagtgtgggctcactgcaggtggttaggctcagatccaaattgtacagatggatagctttggggtaaagaataacatagttgagaagtgcatgtgttagtctgttcatgcactgctataaagaattacctgagactgggtaattatttataaaactcaggtttaattgggtcatggttccacaggctgtacaaaaagtatgatgctggccatcagctcaacttctggggaggccccagaatagttagagtcatggcaaaaagtacaagggaagcaggctcatcttccacggccagagctggagcaagtggtaggagaggtgatacacactttcaaacaagtaggtcttttgagaactccatcaccggacagcacctatgggatggtgctaaattattcatgaaatatccgcctccataatccactcaactgtcaccagcgcagccagccccacctccaacagtggggattacaattccatatgaggtgtgggtggggacacagctccaacctcaatcagtgggcatcctggattgggtctactatagaaggagaaccaggagctgactatgatcttgaaccctacccatgatggccgggcggggtgactcatgcctgtaaccccagcactttgggaggctgaggtgggtggatcgcctgaagtcaggagttagagaccagcctggccaacatggtgaaaacctgtctctactaaaaatacaaaaaattagaccggcgttgtgctggatgcctgtaatcacaccactacgctccagcatgggaaaaaataccaaaacttcgtctcaaaaaaaaaaaaaaaaaaaaaaaaaaaaagactgcccatgaccactgcaccagtgagagggacaccagcatcactgagatgcaagggctggacattcttcataggtcagagctcaaagcaggggacactgatacagagatgggctccatccatagcaccaaagtggtgagaggatgtgggaatggcagaggccagcactttgccatcaatgcaagggggtataaggaggtgacaccagtgccagagtacatcacggggggactgccctacaatatctaggacttacctcttagagcgtgtttcattagcgacaacagatataaatggcagacaggtgtgtccctgcattaacaggaaatagaaatcatcaagaggaacagaaggcagatgtcagcagccccttagaaagtcatcatccttcatacagttaaaatctgagacagttctcacacgagaaggcctaactcaaaaagaggctgggttctcatgaggcaggtttatgcaaaaccaaggaaggtgtacaagtttggaattctccagtttcccttggaaaagacctacagtcatttgcttaggtaactgagcactgaacaaaggtgagtattgttgtcttttagaagctcttggccaagaaggccttgttggcataaaacccatggtttggaaacatcaccatgacccctgttagagtaatggcctaagggtgggggtcaggaaattgatgtattccttgccaacttctgcctctaagtgagtgaactctgtttgtgaacctctctcctctgtggttatgttcctaggctctcatgtataatcaggagtcatagacttagaaacaggaaaaatacttacagtgtttttgtggcctgtgagctatgacttataattttaggaaaaaaacaattgcaaatggaaagcctaagtctatcaatgctcatccaagacaacataatcaataaaaaccaatatcaaatctcaaggcaaattatttcctgtatatagatggcagagatgagcaccaccatcaaaaactcaaggaccagtgctgtgggtccagtcatctgtttcatggaattcaccagtctggtatcttcaaaatccagaaggatgatggcagatggcaggaaagtaatgcaaacgtcatcaggtgtgaccccactgtagcagctgtgatggatgttttctctcaccatagcaataaataacacaacctcggtcacactgtatgcattgttggtctgcaaaatccatgttttgcaaaactcttcaggaaggtggatctgtaatattggcattgacatgagaacaacagcagtatttattcacaatctcaagctctctgtcttcccgtctctctcattagccatccaagtagtcctgaggaaccaagcccatcagaacattctgcaacataatacacagctccattctccattcaaattttgttgttgttgttgttgttgatgagacaacatcttactccatcagccaggctgacgtacagtggggctatctgggctgactgtagtcttgagcttccaggctcaaggcatcctctcacctcagcctcctaagtggcttgaactacagacacacagcgacatgctgggctagtttttgtatattttgtagagacgtgctctcaccatgttattcaggctggactcaaactcctgagcgtaagtgatccaagcaccttggcctcaaagtgctgagattacaagcctgagccactgcacccagcccaatctccattctactgataacaatgtcattaccaggtctgatggacaggaaatggtaaggtttctgaaaacctaaggatcacacagcgagttccaaaggctgaaagtgcatacctgtcgacactgataccaatgacatccaatggtgagaatgacattccttgtagtcctagctctgctcataacaaatctatactgaagtgtaagagtttgatggtcatggggattttccatgtctctgcctttcagcgatgtgccatatctgtgaagtgttcagaaatgcaacagcctgaggcatgctgggcatatcctctaataaaaaggaaaatgccattttatggtcctgtatttctacaagttggaacacatgggcctgtgatccagatgggggaaatgggaatattcccactcattcaccttcatccacgaagcccatttgaaagctttgggcttcccatccttgtagattttagtgttgtgggctgggtgcagtggctttcacctgtactgccaacactttgggaggcctagacaggtgaatccactgaggccaaaagttcgagaccagcctggccaagatggtgaaaccccgtccctactaaaaatacaaaaattagcaaggtattggggccagcacctgtaatcccagctgctcgggaggctgaggctggagaatcgcttgaacccaaaaggcagagactgcagtgacccgatcctgcctttgcactccacctgggcaagcagaacaaaacttctgtcttgaaaaaaaaaacaaaaaacgaacaaaaaagatgttagagttctgggtttagaggtctataccccagaaagagaatggtttcaacaagggacaaagaagttgctttaaacgttgacttgccatttcttttcagtgtgtttgttctcttgcgtcaagagaccaccagaaaagtggtgcaattactctcctgtcaagaatcattgactatcatctgcaagagggtcagatcctggtatataattagggcagaaatacttagtctgagaagggtatgacatccagaggccctattaatgatgtccttttctccatgcctgactctgaccccatgtgctggactgcccctgtgtggatggcctcatggcctgctcggactctgaggtcccaccccaagtggcacctccatggagggctctactcttgtatgggctctgacactcacactgagacactctcccatggacacctcttcacccacttggggtctgaaactgggctactccatccctccctaacctggaacagagagctttcactgctattacacaagtcatagaggctaactcctcatttttccaagctaattattgaaacattagtcctgggttgataagacaagataagttaacttttcataaatttgcttatcaagttttgaataaattcaaataaattcaccttccccacacaccttagttgtcgacatcacacgcgcacccatactcacagggtgagcacgaaggcttcactgtcagtggagaaagtggcaaaacccttctgtgcctcatcctggtctagacctggccctcatcctttcccactcttcccctcactcccttggattcatccacactggcctcctgcctgctgctccacctccctgcgaagctcacccctgcctcagggcctttgcacgtgcagtggcttcaagccatatcctcttcacccagatctcccagatctcctgaatgatcttcttttatcattcaggtctcagcttgcatgtaatcttctcagtgaggattacccaaaccacatagttcattcattcattcaaatattcattcaatggcatattgacaaagcagctacttcatgccaggccttgggccaggtgttatggatatggcaacaaacaaaacaagagttttctgctctcaaatttttacccacttaaaggagatatcatacatcatctgtaaataaatacatcatctgtaaataatgatgtaaataaatacatcatctgtaaatctgtaaataatgatgtaaataaatacatcatctgtaaataaataaagtataataaaagaaaatagtaggtttttttggttggaggtgaccgtgaagtttgcaaataccatcttacaacacattattttattttatttcatttcatttttaattttattattattatactttaagttttagggtacatgtgcacaacgtgcagatttgttacatatgtatacatgtgtgaagttggtgtgctgcacccattaactcgtcatttagcattaggtatatctcctaatgctatccttcccccctcccccaccccacaacagtccccggtgtgtgatgttccccttcctgtgtccatgtgttctcattgttcagttcccccctatgagtgagaacatgcggtatttggttttttgtccttgtgatagtttgctgagaatgatggtttccagcttcatccatgtccctacaaaggacacgaactcatcattttttatggctgcatagtattccatggtgtatatgtgccacattttcttcatccagtctatcattgttggatatttgggttggttccaagtctttgctattgtgaagagtgccgcaataaacatacgtgtgcgtgtgtctttatagcagcatgatttataatcctttgggtatatacccagtaatgggatggctgggtcaaatggtatttctagctctagatcactgaggaatcgccacactgacttccacagtggttgaactagtttacagtcccaccaacagtgtaaaagtgttcctatttctccacatcctctccagcacctgttgtttcctgactttttaatgatcgccattctaactggtgtgagatggtatctcactgtggctttgatttgcatttctctgatggccagtgatgatgagcatttcttcatgtgttttttggctgcataaatgtcttcttttgagaaatgtctgttcatatccttcacccactttttgatggggttgtttgtttttttcttgtaaatttgtttgagttcattgtagattctggatattagccctttgtcagatgagtaggttgtgaaaattttctcccattctgcaggttacctgttcactctgatggtagtttcttttgctgtgcagaagctctttagtttaattagatcccatttgtcaattttggcttttgttgccattgcttttggtgttttagacatgaagtccttgcccgtgcctatgacctgaatggaaatgcctgggttttcttctagggtttttatggtttgaggtctaacatgtaagtctttaatccatcttgaattaatttttgtataaggtgtaaggaagggatccagtttcacctttctacatatggctagcctgttttcccagaaccatttattaaatagggaatcctttccccacttcttgtttttgtcaggtgtgtcaaagatcagatagttgtagatatgtgacattatttctgaggactctgttctgttgcattggtctatatctctgttttggtaccagtaccatgctgttttggttactgtagccttgtagtatagtttgaagtcaggtagcatgatgcctccagctttgctcttttggcttaggattgactttgcaatgcggggtcttttttggttccatgtgaactttaaagtagttttttccaattctgtgaagaaagtcattggtagcttgatggggatggcattgaatctataaattaccttgggcagtatggccattttcacgatattgattcttcctacccatgagcatggaatgttcttccatttgtttgtatcctcttttatttcattgagcagtggttttagttctccttgaagaggtccttcacatcccttgtaagttgggttcctaggtattttattccctttgaagcaattgtgaatgggagttcactcatgatttggctctctgtttgtctgttattggtgtataagaatgcttgtgatttttgtacattgattttgtatcctgagactttgctgaagttgcttatcagcttaaggagattttgggctgagacaatgggttttctagatatacaatcatgtcgtctgcaaacagggacaatttgacttcctcttttcctaattgaataccctttatttccttctcctgcctaattgccctggccagaacttccaacactatgttgaataggagtggtgagagagggcatccctgtcttgtgccagttttcaaagggaatgcttccagtttttgcccattcagtatgatattggctgtgggtttgtcatagatagctcttattattttgagatatgtcccatcaatacctaattattgagagttttcagcatgaagggttgttgaattttgtcaaaggccttttctgcatctattgagataatcatgtggtttttgtctttgggtctgtttatatgctggattacatttattgatttgcatatattgaaccagccttgcatcccagggatgaagcccacttgatcatggtggataagctttttgatgtgctgctggattcggtttgccagtattttactgaggacttttgcatcaatgttcatcaaggatattggtctaaaattctcttttttggttgtgtctctgcctggctttggtatcaggatgatgctggcctcataaaatgagttagggaggattccctctttttctattgattggaatagtttcaggaggaatggtaccagttcctccttgtacctctggtagaattgggctgtgaatccatctggtcctggactgtttttggttggtaagctattgattattgccacaatttcagatcctgttattgctctattcagagattcaacttcttcctggtttagtcttgggaaggtgtatgtgtccaggaatttatccatttcttctagattttctagtttatttgcgtagaggtgtttgtagtattctctgatggtagtttgtatttctgtgggatcagtggtgatatcacctttatcattttttattgcatctatttgattcttctctctttttttctttattagtcttgctaccggtctatcaattttgttgatccttttaaaaaaccagctcctggattcattaattttttgaagggttttttgtgtctctatttccttcagttctgctctgattttagttatttcttgccttctgctagcttttgaatgtgtttgctcttgcttttctagttcttttaattgtgatgttagggtgtcaattttggatctttcctgctttctcttgtgggcatttagtgttataaatttccctctacacactgctttgaatgtgtcccagagattgtggtatgttgtgtcttttttctcgttggtttcaaagaacatctttatttctgccttcattttgttatgtacccagtagtcattcaggagcaggttgttcagtttccatgtagttgagcggttttgagtgagtttcttaatcctgagttctagtttgattgcactgtggtctgagagacagtttgttataatttctgttcttttacatttgctgaggagagctttacttccaagtatgtggtcaattttggaataggtgtggtgtgatgctgaaaaaaatgtatattctgttgatttggggtggagagttctgtagatgtctattaggtccgcttggtgcagagctgagttcaaatcctgggtatccttgttaactttctgtctcattgatctgtctaatgttgacagtggggtgttaaagtctcccattattattgtgtgggagtctaagtctctttgtaggtcactcaggacttgctttatgaatctgggtgctcctgtattgggtgcatatatatttaggatagttagctcttcttgttgaattgatccctttaccattatgtaatggccttttttgtctcttacgatatttgttggtttaaagcctgttttatcagagactaggattgcaacacctgcctttttttgttttccattttcttggtagatcttcctccatccctttattttgagcttatgtgtgtctctgcacgtgagatgggtttcctgaatacagcacactgatgggtcttgactctttatccaatttgccagtctgtgtcttttaattggagcatttagcccatttacatttaaggttaatattgttatgtgtgaatttgatcctgtcgttatgatgttagctggttattttgctcattggttgatgcggtttcttcctagccttgatggtctttacaatttggcatgtttttgcagtggctggtactgactgttcctttccatgtttagcgcttccttcaggagctcttttagggcaggtctggtggtgacaaaatccctcagcatttgcttgtctgtaaaggattttatttctccttcacttatgaagcttagtttggctggatatgaaattctgggttgaaaattcttttctttaagaatgttgaatattggcccccactgtcttctggcttctagagtttctgccaagagatcagccgttagtctgatgggcttccctttgtgggtaacccgacctttctctctggctgcccttaacattttttccttcatttcaactttggtgaatctgacaattatgtgtcttggagttgctcttcttgaggagtatctttgtggcattctctgtatttcctgaatttgaatgttggcctgccttgctaggttgcagaagttctcctgggtaatatcctgaagagtgttttccagcttggttccattctccccatcactttcaggtacactaatcaaacgtagatttaatcttttcacatagttccatatttcttggaggctttgtttgtttctttttactctctttcctctaaacttctcttctcacttcatttcattaatttgatcttcattcacttatatactttcttccacttcatcaaatcggctactgaaggtattgcatgcatcatgtagttctcatgccatggttttcagctctatcaggtcatttaaggtcttctgtacattgttttctctacttagccattcgtctaatcttttttcaaggtttttagcttccttgtgatgggtttgaacatcccctttagctcagagatgtttgttattactgaccttctgaagcctgcttctgtcaacttgtcaaagtcattctccatccagctttgttccattgctggtgaggagctgcgatcctttggaggagaagaggtgctctggtttatagaattttcagcttttctgctctggtttctccccatctttgtggttttatctacctttggtctttgataatggtgacctagagatggggttttggtgtggatgtcctttttgttgatgttgatgctgttcctttctgtttgttagttttccttcgaacagtcaggttcctcagctgcaggtctgttggagtttgccggaggtccactccagaccctgtttgcctgggtatcaccagcggaggctgcagaatagcaaatattgcacaacagcaaatattgctgcctgatccttcctctggaagcttcgtctcaaaggggtgcctggctgtatgaggtgtcagttggcccctactgggaggtgtctcccagttaggctagatgggggttagggacccacttgagaaggcagcctgtccattcacagagctcaaacactatgctaggagagccactgctctcttcagtgctgtcagatggggatgtttaagtctgcagaaatttctgctgccttttattcagctatgccctgcccctacagatggagtctacagaggcaggcaggcctcattgagctgcggtgggctcctcccagttcgagcttccagaccactttgtttacctactgaagcctcagaaatggtgaacacccctcccccacccagtctgccgccttgcagttccatctcagactgctgtgctagcagtgagcgaggctccatgggcgtgggacccactgagccaggcacaggatataatctcctggtgtgccatttgctaagaccattggaaaagcacagtattaaggtgggagtgtcccaattttcccagtacagtctgtcacgggttccctcatctaggaaaggtaaatcccctaaccccttgtgcttcccggtgacgcaatgccccaccctgcttcagctagccctccatgggctgcatccactgtccaaccagcccaatgagatgaacaaggtacctcagttggaaatgcagaaatcacccatcttctgtgtggatcaggctgggagctgcagaccggagttgctcctattcggccatcttggaatggcaatctatgtttgctttttacatttgaaaaaactggtgtcacgtacctaggtattaatcattgtggtatcctcttgccgatttacctctttatcattaactagtgaccctccttgtcttttgttgttacagtctgtgattttagtctattttatctaatatgagaatagctactctggcacttttttggtttccagcttcatgaaatatccttttccatttccctgttttcatttccctttcggtgtctctatagatgaagttgatttctttaaggcaccataagttgggtcttatttctttatccatttgaccatttagagaatttagaacactgtcagtgttattattcataagtaaaaacttaagagtgggtgtagtggtgtacatctgtatttcctgcactttgagagactgaggcgagctgatctcctggggtcaggagtttgagaccggcctggtcaacatgatgaaaccctgtctctactaaaaatacaaaaattagccaagcatgctggcatgtgcctgtaatccaatttacttgggaggctgaggcaggagaagcttgaacctgggagacaaatgttgcagtgagctgagatcacacagagaagtcatctccactctcctcatcagaacctcttgttcacagcatttgtgagcacaaatcaatgatggttattctttcctactaattagggatattttattacacagcaatagcctccagcaaagggaaccatcatacatgattcctacaagttgacagggctggaattatcactgaaaaactaaggtggctatacttgattcccaatgtccaatttttcatgaatagagaaatttatcctttttccccccagccagaaaccaagttttgctcttacgcccaggctggaatcaagtggcacaatctcagctcactgcaacctctgccccccagcttcaagaaattcaccttttgaacaaggagatattaaggatacactatgtgtatgctaccggtggttgcaggagactcagaaaagagagaaacagtcactggcctcgtgcaactgatattctcgggaggagagaaaggcaatcaagaaagaaacatgctgtatttcagacagctgtaagtcctccacaagaaaagaaagcaggtgaggaacataggaaatgtgtcaaccataaggttcccgctaattctataagttggtcagggatatcctccaagaataagcagcatctgagcaatcacctgaagggaggaaggaaggaagactgtgagtggtggcttacacctgtaatcccagcactttgggaggccaaggagggcagattgcctgagctcaggagttcacgaccactcagagcaacctgttgatacccaatctctactaaaaacacacaaaaaaattacccgggtgtggtggcacgcacctgtagtcccagcttccatgcccagctgatttctctctctccatatatatatatatatacacatatattgtttttgcagagatagggtctcactgtgtcacccagtcatcaagcaattctcttatactgttttggaaaagcatgggaattacaggtgtgaaataccctgctggtcctgaaaaatgtgatatttgggattctctgcctggcttgttttacccaaaataatgacctccagttccttccaggttgctgcaaaagacatgattttcactgttttataactgaatagtattcctgtatgtatacataccacattttctttatttattcttctgttgattgacatgtagggtgattccatgtctttgctactgtaaataatgctgcagcaaatatttgtgtgcattttgatctattcctttgagtaggtacccagtactgcaactgcaggactgagtagttgttatattttttgttctttcagaaatctccatagtgtttgccataaaatctgcactaatttacattcccaacaacaatgcataagatttccccttttctccacattctcactaacatttgttatgtttttgtctttttcataatacccattctgactggagtaagatatctcattgtggtggttgttgatatttttgagacggggtctcactctgttgccagactggagtgcagtggtgtgatcgtggcttgctgcaacctccacctcccgggttcaagcaattctcctgcctcagcctcccgagtagctgggactacaggcgcgtgccaacaggcctggctcattttttgtatttttagtaaagacagggtttcaccatgttggccaggatgatcacagtctcttgagctcatcatacacctgcctcagcctcccaaagtgttggaattacagtcatgaggcagcgcacccaacctcaatgtggttttaatgaccatttctctgacgattcatggtgtggagaatttctttgaaataccttttggccatttatatgtgctcttttaaaaactgactcctgtccaggtgcggttgagcatgcctgtaaccccagaacttcgggaggctgaggccaatggatcacttgaggcaaagaggcagaaatcagcctggccaacaaggcaaaaccccatctttactaaaaatacaaaaaatcagccacgggctgtgactcgtgcctgtggtgcaagttactcaggaggttaaggcacaggaattgcttgaacccggtaggcacaggtcacagtgagccaagatcatggcactgcactacagcatgggtaatagagaaagacctgtctcataaaaacaaatgaataaataaataagataaaaaataaaaaagtctctttatgtcctttgccgactttttaatgggattctttggagttttctgttgtagttgagatctttgtttactctcggtattagtcttttgtcaaaggaaaagtttacaaataatttcttccgttctgcagtttgtctgctcactctgttgagaggattatttctttggctgtgcagcagctttttgtttcagtaaagcttttgaatttatataattaaaattttcagtttggtttaaatttgcactggtcgatttttggttttgttgcctgtacttttgaagtcatactcttgaactctttactagacaataaccagaagagttttctctagttttcttctcacatttttattatttcagtacatatatttaagtctataattcatcttcaattgatttttgtagaaatagtgagaaataggagtccaggtttattcttctgcaaatgacaattcaattgttccagcaccaattattgaaaagggtgtgctttcctcaacgtatattcttatcagctttgtcaaagatcagttggctataaatgtgtggctttctttctgggctctctagtctgttacatcaatctgtgtgtctatctgtatactactaccatgctgtattggtgatgatggctttgtaatataatttgaagtcaagaaatgtgatgctcccagctttgtttatttgcttcagaaaggctgagtcaacagctgcagagatgaagctgcccctcctcgcagggctccttcccggaaaaagatcatggctcccactgaccatataaccatggctggaactcctgaaattcccaaagggaggccctacccagtgaggggggatgaatgaaggtcctacttaaggaatctgtctggccacaatcaggcacagcagctgtgctgccttgtgggggaccagaccacctggattccctggagcctgcaggctagaatgtctgagtccatggaaacacagaaatggaggccgccctcacctccccagaaaactgtagtctcaggcagtctccagccgattgccactggttggctgctattccaagccagtgggtcttaacttgagaggtgctgtggaagtggggcccacggaatgaggctgcttggctccctggattcagccccttttctaagggaatgtacagatggaactcccgccttgcccagctttccaagtatataaaactcctgagtctctgtgagtgtctgagcgagtgctctggcaacattcgacacggctctgtgtatctgacccaagacccttatggcatgagctaatgggaggatcttctgatccatgcgtggcaaagatgcatgggagaaacatggtttgtgggtaggggttgtgcattcactactgcttctcttggctgtaggtgaaggtttctttggctctgtgctgatactgggtgcaccatcacccaccccctttgtttcttctcctgggtcaagtcatttgcctaatcagtcccaatgtaggaacctggatacttcagttcaaggtgctgaattcaccgtgcttttcattcaggggaagacagctgcttctcattgggcatcttggcctgcccacttcacgtcactttttgtaaaatccacaccactccaggaatatccattacttaacttcgcctgaaataaacagaaggctcattacacttatcatgggctcacttacttcgcctataatgaaggtgccatggaaatgctagtggatgacgtggtccattttcttagggatgagatagaaaaatggtgtatggctttttaatttaattaaaatttttagtttggtttaaatttacattggtctctttttggttttgttgcctgtacttttgaagtcttactcgtgaactctttactggacaatgaccagaagagttttccctaagtttcttctgatattttgaccatttcagtacatacatttcagtctataattcactttaaattgatttttgtaaacatggtaagaaataggagttcagatttattcttccgcatatgataatgcaactgtcccagtaccaattattgaaaagggtgtgctttccctagtgtatattcttgtcagctttgtcaaagatcagttgcctatgaatgtgtggctttcattttggattctctcgtctgttacatcaatctgtgtgtccacatttatacctgtaccatgctgtattggtgactatggctgtgtaatatattttagagttaggaaatgtgatgctcccagctttgttcatttgcttcagctgaaaaggttgagtccacaattacaaagatggcagccgcccatccccggaggacctccaacccagaaagagatcaggcttcccaccaaccctataaccctggctggagttcctgaaattccaacagggaggaccttcccagtgaggagggatgaatcaaggtcaaatttaaagaaacagtctggccactatcaggcacagcagcagtgctgccttgtgggggacccctcctgctccagaccagctgccctccctggagcccgaaggctagattgtctgagtctacggaaacagagacggtggccgccccaaccacccagaactcggtagtctcaggcacttggcttgctatcttgccactgcttggctggtattccaagcccgtgggacttgagaagtgctgtgatgatggggaccacaggatgaggctgtctggctccctgtgatatggctgtgatgagtggaggaacaccagggctcatgtctcacacagaattggagaaaatgacacaaacacatgtacagtggttttatggcgtgcagtttaataggcaagaacgaaggaagagctccccatactgagacagagggaggggggctccaaagccaaaagaggaaacccggagtgctgtggataccaatgagttatatgaagaaactggagggggcggtgtctgatttgcatagggttcaggcgattggttcgaccaggcatgtcatttatgtggcccacggaaaaactggccctcccacctagcctttgaatatgcacgtgccggacaccctgatttcctacactcatggggatatatgggggtggccatatcgccaggcacaggtggggacaagggccagaagagggcgggaatcgctatgtttgggtggacccagtttctaatggccggcatctgcagatcaaggttaccggagaactctaaaagccggggctttcctgctagacaagactcatttctggagctgctttaaaaagaaacaaaacttcccaaggaccccttttcctccctgtctgcccaaaataatttcttaacaactcgtataacacctgaattcagcccccttactgggggaatgtaccaacggaactcccacctttcctggtttctcaaggctagattgtgtaaacctcctgggtctcggtctgtgtctgagcagctgctctgccaacactccacacagccctgtgtactaggcccaaggccgccgtgactcagcccatgggaggatctcctgatttcttggttgcaaagatccatgggagaaaaatggtttctggggcggggtcacacactcatggcttctcttggctgtgcaagaaggttcctttggctctgttccaatatagcgtggttcatcacccacccctgttttctttgttctcctgagtcaagttgtttgcctagtcagtcccaatgtgagaacctgaatatttcagttcacgtgcttatcgtgaaattcactgagactttaattcagtggaaggcagcctcttctaattggccatcttggcccgccccctccacgtcacctcccataaaatggccacgctctccagggacgatgccattatatatctttacgtgaaaccgacagaacacttattacactttttgtgagctcatttacttcacttataatgaacatggccatggaaatgctagtggagaaagtggtcgattttctgatggatgtgataaaaaaatggtttgccgaccaattaatgacatatgtctcaaaactagtaacgagacccttaatcgctgggttgaagtttctaatcaagaagatgctcatctatgtattcaacaaagcagcttcccttgcttctgaaatgcttccaaacaacatctcatatttcctgaagaagataatgcctggacaagcagcacaagtcattcaggtttactttcagctcataaatccagcaggatattcgcacaattgttgggaaaccttatcagttcatgagtcgtgcatgtttcctttaatttcaggaggaagagggtaatctggaagagtttcctgacctactctgctgctgtgattaaacaaccaccaggaaattttgatgacactgttctcctgagctcctccctttcctcggggaagaaaagcattgaaactacaaaaataaagtgttatttggctggagtgaggtctcatgtctgcttatgcggtggctcgctgctcagaacagggtgagtctctgagttgtacgctgaggaggggaggctgtcaatctagaaaaaacccattgcatgggacacctccatggggtctggggggctgaggatgaggagctggactggatctagggaaggaggaggtttcagagggtgaaattctggcagtaaatcctgggggtgtttgaaaacttcctccctcagaaggagaagactcagggaggaataaggacaaaccatgggtcccttgaggggcatttactaacttaagaggactttatcgggaagcagagtgacaatggcctccttgaggactgaggcccctggataaatgaggcccagatccagatccagtccatgggagatgagaccttcaagggacatatttttgttgggacagaggaaaagtgcagctctgcagctgcagaggaagccttggcagtgtgaaagcgaccttggagggggccctgtgcgttctgaatgcttctgaggtccatcccctgtccccgcctctttttctggattttttgggctccatggtctccgccatcttctgagcgctccacgctgccaccttcagttttctcttctgggctccaaatactccaaaatctttcatatctgtgcccctacccctgtttttagcatgtgttgggactccaggtccctgaaggtttctggcctgaaatccacctccccagcggtgtggattctgctctagagaccccgcacttggcaaggttcccaggcccctgggggacaaccgagtggtatgtgcacttcagggctccacactcggcaaggtctttcaagcccttggggttccctcctcagttttcttcacatgtctgggatgtagtcactctataaatgccgggatgtgatccccaccccagtgattttttttagttccatgagtgttgctatctgaatagtcatcctgagagtgatgggaccttttgaatttgcagcaagttttagattagtgtgagtggcctgagatcgcaaaactggggctagcattggatgtgaggttaggctggtggaaaaatttgcccagaacctgaggagtgtgggctcactgcaggtggttaggatcagcacagaattgcaaggatgtatagctttggggtaaagaataacatggttcagaagtacatgtattagtcttttcatgcattgctataaagaattacctgagactgggtaattaattataaaaactcaggtttaattggctcatggttccacaggctgtacaaaaaggatgatgctggccatcagctcaacttctggggaggcgtcagaaaacttagagtcatggcaaaaagcacaagggaatcaggctcatcctccatggccagagctggagctagtggtaggagaggtgctgcacacttttgaacaatcagatctttttagaactctatcaccagacagcacctagaggatggtgctaaattattcatgaaatatccacccatatgatccactcaattctcaccggcccaaccaggaccacctccaccattggggattacaattacacatgagatgtgggtggggacacagatccaaactcgatcagtgggcatcttggactgggtctactatagaagaagaaccaggagctgactatcatccttaagactgcccatgatggccaggcagggtggctcatgcctgtaatcccagcactttgggaagccaaggtgggtgaatcccctgaggtcaggagtttgagaccagcctcgccaacatggtgaaaccctgcctctactaaaaacacaaaaaattagatgggtgttgtgccagacgcctgtaatcacagctactccagaggctgaggcatgagaattgcttgaacctgggaggcggaggtggcggtgagccccaatcgcactgctacactccagcatgggcaacaataccaaaacatcgtctcaaaaaaaaaaaaaaaaaaaaaaaaggctgcccatgaccactgccccagtgagagggacaccagcatggctaagatcaagtgctggacattcttcatgggtcagacattaaagcaggccacactgttacagagatgggctccattcatagcaacaaagtggtgagaagatgtgggaatggcagaggccagcactttgccatcaatgcaaggtgggcataaggagctggcaccagtgccagagtgcatcaggggaggactgctttgcaatatctagcacttacctcttagagtatgtttcattagggacaacagatataaatggcagacaagtgagtcccttcagtaacaggaaatagaaatcatcaagaggaacagaaacagatgtcagcagccctcatataaagtcatcatccttcatccagttaaaacctgagacagttctcacataagaaggtctaattcaaaaagagactgggttctcatgaggcaggttcatgcaaaaccaagggaagtatacaactttgggattctccagcttcccttggaaaagacctacaatcatttgcttaggtaactgagcactgaacaaaggtgagtattgttatctttcagaagctgttggccatgaaggtcttgctggcataaaacccatggttggaaacatcaccatgacccctgttagagtaatggcctaagggcaagggtcaggaaattgatgtattccttgccaacttctgcgagacgagtgttggtccactcatctctttcacggaattcaccagtctggtatcttcaaaatccagaaggatgatggcagatggcaggaaactaatgcaaacaccatcagttgtacctccactgtagcagcagtaatggatgttatctcttcattgtaatatccagggagggagaagatgacattattctcaatattctaaacaccctgtgtgtacagcctctgtgatattttttgtaatatccgtgtgggagagaattatattactcctaatatctcaggggttgtgccccctctgtgacaatgttcctaacacccaggaggggataggatgatatcacttttagcatcacagggggtgtacaccccactgtaatattgttcataatatccgggggggagagaatgatattactcccaatatcgcaaagactgtacaccaacctgtgatattatttgtaatatccataagaggaagaataatattactcccaatgtcacaggaagtgtacacccttctgtgatattgttcaaaagatccagttagggaggggatgatattactctcaatatcttaaacaccctgtaggtaagccctctgtgatattcctcataatatccagagggagaggatgatattactcccaatattgcatgaagtctacaccccacctgtgatattgttcctaatatccaggatgggagaggatgatattactcccaatgtcgcaggggatgtacaccttccctgtaatattgttcgtaatatctagaaaaggagaggataatattactttcaacatcgcagggggtgtacaccttccttgttatattgttgctaatatccagggaaaaagaagatgacattaccaccactattgcagaaggtgtacacccccccttgatatagttcctaatatccagaaaaggagaggagatattactccaaatattgcaagaggtgtacattcccctgtaatatttttcctaacattcaggaagaaagagagtgatattgcccttaatattgaagggagtgtgccccccccgtgatattgtttctaatatccaagaaatgaaaggatgatattactcccaatatcacaggggctgtacagccccctcccatgatattgttcccaacatcggggggggggtgaaatagtattattcccagtatcacaataggtgtacacacctgtcgtgatattgttcctaatacccatgggggaaaggacgatattattcttaatatctcagagggatgtacaccctccctgtgatattgttcctaatatccggggtgggagaggatgatattacccccaaaatctcaaagggtgtacacccctcttgtgatattgttcctaatatccagggtggagaggataatattattcccaatatccaggaaaggaaacgatgatgttactgtgaatattccagggggtgtcctcccctctgtgatattgttcctaatatccaggttggggagattatgatatttctccaaatatcacaaggggtgtacaccaaccctgtgttattgttcctaatatcgatggggggagaggacgatattactcccaatatcacagggggtgtacaccacctttatgatattgttcctaatatccatgaagaaagaggatgatattactttcaatatcgcaggggatgtacactccccctgtgatattgttagtaatacctaggagaagaaagtgtgatattactcccaatatcgcaggggatgtacacgcttcctgtgatattgttcctaatatttagggggaaaggggatgatattactcccaatatcgaatggtgtgtacacccccccgtgattctttttttttttttttttttttttttgagatggagtcttgctctgccgcccagactggcgtgcaatggcgcaatctcggctcactgcaacatttgcctcccaggttcgcacgattctcctgcctcagccttcggagtagctgggattataggcagctgtcaccataccaggctaatttttgtatttttagtagagttggggtttcaccatgttggtcaggctggtcttgaattcctgacctcaaataatccacccaccttggcctcccaaagtcctgggattacaggcataactttccctgtgatattcttcctaatattcaggaagaaagaggatgatattgctcccaatatcgcagagagtgtgcactcctcctgtgatatggttcttaatattcagaggaggagaggatgatattactttctatattgcagaaggtgtacacctccctcgtgatgtctttcctaatatccagtgggggagaggttattagtctcaaaatcacagaaggtgtaaacccccatttgatattgttcctaatattcaggggtggggagagaaaggtattactcctagtatttcagggcatgaacacccccaccgtgatatcattcctaatatccagaaggggaggcaatgatatttctcctaatatcacaaagggtgtacaccccttctgtgatattgtaaatattctgtgtgtacacccccctgtgttatagtctgtaatatccgggtgggggagagggtgatatttctccccatattgtaggggatgtacacccttctgtgatatggttcgttatatccagggaagaaaaaggtaatattgctgcccatattgtggagagtgtacacccccatgtaatatggttcgtaatatccaggagtggagagggtgatactgctccttacatcgaggaaggtgtacaccttattgttatatgattcgcaatatccaggggaggagagagtgatattgctccccatgtcgcagggggtgtaaaccctccgtgatatgattggtaatatccaggaaaggaaagggtgatatttctccccatatcgcgggggacgtacatcctcctgtgatatggttcgtaatatccaggaggaaagaggaaaatattgctcttcataacccgaggggtgtacaacccctgtgatatggttcgtaatacccagaagtgtacacccctctgtgatatggtttgtaatatccagggggttagagggtgatattgctccccatatcgcagtgggggtacacccccctggattggttcataatattcatggggggagaaatttacatttatcctcatatcagggggggtgtacaccccccgtgatatggttcgtaatatccaggggaagaaagggtgatattgctccttatatcgcggaaggatcaccctcccctgtgatatggttcataatacccagacgggaagagggtgatattgttcttcataaagcgaagggtgtacagccccctgtgatatggttcataatatgcaaaaggggagagggtgatattgctccccatatcacggagggtgtactcccttctttgatatggttcgtaatatccaggggtgtagatggtgatatagctcgccctattggggagggtgttcacccctctgtgatattgttcgtaatgtccagggaaagagaggatgatattactcccaatatcgcagaaggtttacaccactctgtgatattgttcataatatccagggaaggagaagacgatattactcccaatatggcagggggtgtagaactcctgtgatattgtttgtaatatccaggcaaggagaggatattactctcaatatcgcagaaggtttacacccctatgtgatactgttcatgatatccagggaaaaagaggatattactccctatatcacaaagggtgtacacccctttgtgatattttttgtaatatccaggggagagaggataatattactctcaatatcagaaggggtgaaaaccctcctgtgtcattgttcataatatttagggaaggagagagtgatattactccaaatatcacagtgggtgtacacccccctatgatattgttcctaatttccagaaggggagatatgatattattgccaatatcgcagaaggtgtacaccttactctgacattgtttgtaatatccagatggggaaatgatgatattactcctaatatcacagggggtgtacacccccttgttttattgtttgtaatattcaggggaagagacgattatattactcccaatatcgcagggtgtgtacaacactctatgatattgttcataatatccaggggaggagaggaagtgtacacccccccgtgatattgttcgtaatatccagaggtagagaggatgatattactcccaatattgcaggtggtgtacacctttctgtgatattgtcatgatattaagaaggggagaggatgatattactaacaatatcacaaaaactgtacactccctgtgatattgttcataatatccagaagaagggaggatgatattattctgaatctcgcagaagatatacaccaccctgtgatatggttcataatatcctaggggaaagaggatgacataactgtcaatatcgcagggggtgtacaattccctgtgatattgttcacaatattcagagggaaaaaggataatattactttcaatatcgcaggcggtgtacacattactgtgttattgtttataatatccggaatgagagaaaattttctcccaatatcacaggaggtgtacactcccctgtgatattgttcgtaatatccagggaggggagaggatactattactcccaacatctcagggagtgtaggccccccctttgatattgttcctaatattcggaagtggagaagatgatattacttccaaaatcgcagggggtgtacactccctctgtaatattgtttctaatattcatgagtggaaagaaagatattactcccagtattgcaggggacatacaccacactgtgatcttgttcacaatattcgggggggagaggatgatattactcccaatatcaaagtaggtgtacacccccttctgatattgatcgtaatatccagaattaaagatgataacgttactcccaatattgcagggggtgtacatttttgaatactgttcataatattaagagggggaggggatgatatctgtcccaatatcgcaaagtgtgtacacctcctgtgacattgtcccaaatatccagaggaaaaaaggatgttattactcttaatatctcagagagtgtacacctccctgtgatattgtttgtaacatccagaagaaagaggctgatattactcttaatatcgcagggggtgtacacccccgccccgggatattattcgtaatatccagggggaagtggaatgttcagaatgggagaggatgatattacttgcaatatcatagtgggtgtacaccccactgtgatattgtttgtaatatccgggaaaggagaaaatgacattcctccccatatggcaggggctgtacaccacctatcatattgttcaaaatatccagaaggggagaggatatgtctccaagtatcacagggggtgtacaccccgctgtaatattcttcctaatatccagggtgtgagaggataatagtactcccaatatcccagggcatgtacaccccccttgtgatgttgttcctaaaattcatggggagaaagaatattactcccaatatcacagggggtgtacatacactctgtaatattgttgccaatatgcagcaggagagaggatgatattactcccaatatcacaggggctgtacaccccgctgggatattgtttctaatatcaagggggaaaaaggatgatattactcccaatgtcgcagggtgtgtacttcctctttgtgacattgttcctaatatccaggagagaagagggtgacattccttccaaaactgaaaggggtgtacacaccctttgagatattgtctttaatatccagaacgaaacaggatgatataactcctaatactgcaggggggtacaccctctctgtgatactgtttctaatatccaggaggggaaagaaaaatattaatcccaatatcacagggggtgtacattccccctttaatattgttcctaatatccaggaagacacaggatgatactatttccagcagcacagggcatgtacacccctttgtgatattgttcctaatatccaggaaaagagaggatgatattactgtcaatattgcagggcgtatacactggttctgtgatattgtttctaatatccgggggtggagaaaatgatattactcccaatattccagcgggtgtacacccgttctatgatattgttcctaatatctgggggagagagaatgatattattgtcaatatcacaggggatgtacagattccctgtgatattgtttctaatattcacagggggagaagggtataatactcccgatatcgcagggggtgtacactccccctgtgaagttgttcctaatatccagggattgagagaatgatattactcccaatatcacaggcggtgtaaaccccctgtgtgatattgttcctaacatccagaggaaaagatgatgatattattttcaatatcacagggggtgtacgcatccctgtgatattgtttctaatatccaggggaggagaggatgatattattgttaatatcgcagggggtgtaccccaccctgtgatactgttcctaatatccggggtggaagaggataatattgctcccaatatcgcaaagggtgtacaaccttcctgagatattggtcctaatatccagggagggagaggatgatattactttcaatatcacagggagtttacacaacccctgcgatattgttcctaatatccagcggaagaagagttaggataatactattttcaaaattgctgggtctgtaccccctccccgtgatattgtttctaatatccaggaggggagaaagtaatatgactcccaatatcttagaagatgtacaccctccccataatattatttcttacatccagggggtagaggatgattttgctttcaatatcacagagggagtaaacctttccggtgatattgtttttaatatttaaaaagagagaagataaaattactcccaatacaaaggggatgtattgtgtactcccccctctgatattcttttttaatatccagatggagagaggatgatattactttcaatattgcatgggatgtataaatcccctgtgttattgttctgaatatacaggtggggagagtatgatattactccaaatatcgcagggggttctttccccctgtgatattgttcctaacattcagggagggagaggatgatattactcttaatattgcagggggtgtacccacgcctatgatattgttcctaatatccagagggggagaggatgatctaactcagaatatgacaaggggtgtacacacagcctgtgatatggttcctaatatacaggggagaaggggataatatttctcccaatatcgcagggggtgtacaaccccctgtgatactgttcctaatatacagaaggggacagcatgatattgttcctaatatcgcaggaggtgtacaacgccctgtgatattgttcctaatatccagggcgggagaggatgatattaccctcaatatcgcagggggtgtgcactttccctgttatattgttcctatgatccgggtggggggaaatgacattagtcccaatatcgcaggatgtgtgcaccgctcccccgtgatattgttcctaatatcaagggggagagaggaggatattactcccaatatcgcaagggatgtacatcctccatgcgatattgttcgtaatattcaggaggagagaggatgatattactcttaatatcgcagaaagtggacacccaccctgtgatgttcttcataatatccagggaagcagacgattatatgactttcaatatcgctgggagtgtacatcccttttgggatattgtttctaatatccaggaagggagaggattatattactctcagtattgcaggcagtgtacaccttttttgtgatattgttcctaatattcagaaagggaaaggatgatattactcccaatattgcaggtggtgtatatccccctctgatattgttccttatatcaaggaagagaaagaataatattactcccaatatcaaagacagtgtagacccctcctgtgatattgtatttaatatccatggggaaagaggatgatgttactcccaatatcgcagggggtttacacccacactgtgatattattcctaaaatccagtggaggagaaaataatattgctcccaatattgcagggtgtatacaggccctcccccgttatattgctcctaatatccagcggtggagaggatattactttcaatttgtgtagggagtgtatacccccctgtgatatttttctaatatcaaggatgggaaaggatgacattactcccaatatcgcaggaggtgtacacgccctgtgatattgttcctaatatctagggaaggagaggatgatattactttcaatattgcaggagctgtacaccctctgtggtattgttcttaatatttaggttgggagaaaatgatatgagtccaaatatcgcagaaggcatacacacttccaataacattgttcttaatatccgggggagagggtgatattactcccaaaatctctggggggtgtacacccccttctgatatttttcctaatatccagggaaggaaacgatgatattactataaatattccaaggagtgtacaccttcctaatatcctaatattgttcctaatatccaggggtgggagaggattatattactcccgatatcgcagtgggtgtacacccctcctgtgatattgtttctaatatccaagctaggagaaaatgatatcactctcaataccacagggggtgtacaccttccgcatcatattgttcctaatattcagagggaaagaagatgaagttactttcaatatcggaggggttgtacacaacccctgtgatattgctgctagtatccaggaagaaaggggattatgttactccccttatagcagggggtatacacctcccctgtaatattgttcctaatatcaaggctgggatatacgtggggggaaggatgatattactcccaatatcgcaggggttatacaaccttctgtgatattgctcctagtaaccagggcagaagaagatgatattactcctaatatcgcaggaggtgtacactcccccattatgttgttcccaatatgcagaaaaggagaggatgacattattgccagtatcgcagggtgtgtacaccacccctgtaatattgttccaaatatttagggggagagaggatgatattactcccaacatcgcagggggtgtacacacatcccctgtaatatagttcttaaaatctaggggaaaaggggatcttatttctctaaatattgcagagggtgtacactccccggtgatattgttcctaatagccgggagggagataattaaattactttcaatatctcagagagtgtacatcgcccttgcgatattgttcctaatatccagagcaaaagagaatgatattactcccaatatcttaggagtgtacatttaacctgtaatattgttcctaatatccagggggaagagaatagtattactgccaatatcgtaggggttgtacaccttttctgtgatattgttgcaaatatttagtagagggaaagaatattactcgcaatatcacagggaatgtatacttcccctgtgatattgttctgatatccagaaaaagagagggtaatattactcccaatattgcagggggtgtacaccccccttgtgatattgatcctaatataaaggaaggaagaggatattactcctcatatagaaggggttgtccaccccccttgtgatattattcctaatattcagggaagcagaggatgatattattttcaatatcacagagggtgtgcagtccacctgtgatattgttcttaatattcggggggagaggatgttattatgcctgatatcgcagtagaggtacacccctcaagtgatactgttcctaataaccaggggtgaagaggatgatattactcccaatatcgcaggtggtgtacacccccccatgatggtttctaatatacagagggggagaggaaaatattactcccaaaatcgctggaggtctacaccccccttgtgatattgttcctaatatccaggaaaggaaacgatgatattactgtgaatattccagggggtgtacacccgctttgtaatattgttcctcatatccagggtgtggagaggattatattactcccagtatcgcagggggtgcacgacgcccctgtgatattgtttttcatatccaggaggggagattattatcaatatggcaaggggtgaacaccccctgtgatattgtacttaatagttaggttggcagaaaatgatattagtctcgatatcgcagggggtgtgcactccgcctggtgatattgcttttaatatcaagggggagaaaatggcattactcccaatatcgcagggggtgtacaccgctcatgtgatattgttcctaatatccaggtggagagaacataatattactcccaatatcgcacaaggtgtacacccctcctgtgatatggttcctaatatccatgggaggagatgatgatattactcccaatatcacaggggatgtacaccacccttgtgatattgttcctaatatccagggaagaaaacgatgatattattgtgaatattacagggagtgtacacactccctgtgatattgtttttgatatacagggtgggagaggatgatattactcccaatatcacataaggtgtacaccccccgtgatattgttctaaatatttcggtggggagaaaatgatattagtctccatatcacagggggtgtgtgctcctcaggtgatattgtttttaatatcaagagggggaggagattatattactttcattatcacagggggtgtacacccctcctgtgatattgttccttatatccaggcgaggggaaaataatattactctcaatatcgcaggaggtgtacacaccccatgtgatattgttcctaatattaagggggaaagaagataatattactttcaatatcacagggtttgtactcctttcttgtgatatagtttttagtatccagggggaaagagcatgatattactcccattgtagcaaggggtgtacacacctcctgtgatattgttcctaatatccagaagtggtgaggatgatattactcccaatatcgcagggggtatacaccccacctatgatattatttctaatatccatgggaaaagagtatgatattacacccaatgtcgcagagggtgtgtatttttcctgtgatattgtttctaatattcaggcggggagaagatgatattactctcaatatagcagaaattgtacatccccgctgtgatattcttcataataatcagggaaaaagaggatgatattactaccaatattgcaggggggttacacttcccctatggtagtgttcctaatatccaggaagaaagaggatgatattaatcccattatccaggaagtgtacacccaccctgtcatgttgttcctaatatccagcagggaagaggatgatattacaccccccccccgtgatattctccttaatatccaggaggggagaggctgatattactggatatatagcaggggtgttcataccttctgtgatattgttcctaatatccagaaaaggagaggatgatattacttccaatatcgcagaaggtgtacacctccctgtgatattgatcctgacattcagaaggggagaggatgatattactcaaaataccgcagggcatgtgcattcccttgtgatattgttcctaatacccagaagggaacaggataatattactttcaatatcgcagggagtgcacacccccctttggtatggttcttaatatccagaaggaaagagggtgctattactttccatattgcaaggggtgtacaccccactgtggtatggttcataatatccaggcagggagagggtgctattactccccacagtgcggggcatgtacaccctgctgcggtacggttcctaatatccagggggagagaggatgctatgactccctatatcgcggggtgtgtacacccctgtgtggtatgttttgtattctccaggaacggagagggtgttgttacccctcatatcgctggaaatgtacactcccctgtggtatggttcgtaatatccaggggattgagggtactgttacccccatactccccatatcgtggggggagtgcacctccctgtggtatggttcgaaatatccagggtaagagagggtgctattattccccattttgcaggaggcgtacacccccctatggtatggttcgtaatatccggggtgaggggatgctatcaaaagaagagagaaagagaccccccatattgttctatattattttatactcagtacctgttttaagaagaaacaaggaagtgaaaccaaaagcaggcagcccggcgccaggcaccagacccaaaaccagacccgaaaccaggcctgggcctgcctgaccttagcctgatagttaaaattcaacccatgacctagcaaccaatgttatccatagattccagacattgtatggaaggacattgtgaaatttcttgttctgtgctgtttcactctgattaccggtgcctgcagcccctgtcacatacccactagattgctcaatcaatcatggccctttcatgtaagatctttagtgttgtgagcccttaaaaaggacagaaattgtgcactcaacaagctcggattttgagacgctagtctttcgatgcttccagctgattaaaagccacttccttcactacctcggtgtctgtggggttttgtccgcgactcctcctgctacactatgactccccatatcaaggggggtgtacacccccctgtggttcgtaatatccagcaggggaaaaggtgctattactccccatattgcagggagtgtacacccccttgtagtatggatcgtaaaatcaaggggggagggaaggtgtaattatccccatatctcagggggtgtacacccctttgtggtaaagtttgtaatatccagggatattacagggatattatccccaaattaatacttttataatttcttatgcctgcctttactgcaatctctgaacataaattgtgaagatttcatggacatttatcacttccccaatcaatacttttataatttcctatgcctgtctttactttaatctcttaatctcatcatctttgtgagctgaggatgtatgtcgcctcaggaccctgtgatgattgcattaactccacaaattgtttataaaacatgtgtatttgaacaatatgaaatctgggcaccctgaaaaagaacaggataagagcgatgttcagcgaacaagggagataagcataaggtctgactgcctgtggggctgggcagaacagagtcacatttttcttattgcagaaaatgagtaggagaaatatcactgggaagggaacgcattcctaggggaggcctatggacggccgctctgggggtgtatcccttatgtggttgaagataagggatgaaatacaccctggtcccctgcagtgccctcaggcttgctaggattagaaattccagcctggcgaattctagtcagaccagttctctgctcttgaaccccgtttcctgttaagatgtttatcaatgacaatgcgtgcacagcaggacatggaacctcaatagtaattccattttctccctggccttgtgaccttgctaggcccttctgcccttgtgatcttttattgccatttgaagcatgtgatctctgtgacccactccctattcgtatccccctccccttttgaagtccctaataaaaacttgctggttttgcagatcaggtggtcatcacagaacctgccgatatgtgatgtcaccccggaggctcagctgtaaaatttctctttcgtactctttcactttatttctcagaccaggtgacacttaaggaaaatagaaaagaacctactttgaaatattgggggctagttcccccaatagacattgttcctaatatccagaaaaaaagaagatgatattactcccaatatcacaggggttgtgaaccccacctgtgatatggttcctaatatccaggaagggagagaatgatattactctccatattgcagggggtgtgcacatccctgtgatattgttcctaatatccaggggaggagagggtgatattactcccaatattgcaagggttgtaaactccaccctgtaatattgctcctaatatttaggatttagggggggagaggataatattactcccaatatcgcaggggatgtatatgccctctttgatattgttcctaatatccagggggggagaggataatattactttccatatcacaaagagtgttcacccccctgtgatattgttcctaatatccaaaaaggaagaggatgatatcaatcccaatatcacaggaagtgtacaccccccccttttatattgtttctaatatccaggggaaatgagggtgatatttctctcaatatagcagaatgggtacactccccctgggatattattcctaatatccaggggaaaaaaagaggttgatattcttcccagtatagcagggaatgaatacaccctttgtgatattgcttctaatatcaaggggaaaagaggatgatatgactcccaatatcacaggggatgtaaacctgtggcgttgttgctaatatcaaggagggaagagtatgatattactcctaatgtcgccgaaggtgcacactttccctgtgatattgttcctaatatccaaaagggaagagaatgatattacccccagtattgcagggtgtacaccacccctgtgatattgctcctaatacccaggaaaaaagagaatgctattacccccaatatctaaggggacgtataccttccctgtgatattgtttctaatatccaagtggggagaggatggttttactctcaatattgcagggagtgtacactccccctgtgatactgtttctaatactcgggctgggagaaatagtattactcccaatatcgcagtgatattgtttccctgtgatattgtttctaatatctagtgggggagataattatattactaccccatacacaggggagggtgtacattcccctgtgatattgtttgtaatatccagggaaggagaggatgttactcccaatatcacaggggttgtacaccccttttttgatattgttcctaatatctggggggcagagaattatattactgtcaatatcacagagtgtgtacaccccctctgttatattactctttatattcagggcggtagaggatgatattactccctatatcacagggggtgttcacccctcctgtgatattgtttataatatctaaggggaaagaggatgatatcactctcaatatcaaaggaaatgtacacctttcctgtgatattgtttttattatataggggggcagaggatgatattaagaacaataccacaggggatgtacacccacgtattgatattgtccctaatatgtatggggaaagaggacagtgtaactcccgatatcgcagagtgtgtacacccccttgtgatattgtttctgatatacacggggagaaaagataatatttcttccaaaattgcagggggtgtacaaccccctgtgatattgtttttaatatccagtgggggagagaatattactcccaatattgcagggcgtgtacacaacccctgtgatattgttcctaatatccagagtaggggaggatgacattactttcaatatcgcaaggggtgtacattcccctgtgatattgctcctaatatccatgaggggagaggatgatattattcctaatatggcaggggctgtacaccttccctgtgatattgtttctaacatccagtgggggagaaaatgatattactccctatatcacagaaggtgtacactttccctgtgatattgttcctaatatccagaaggggagaggataatattactcccaatatcgcaggaagcttacaactcccctgtgatattgtttctaatatccagggaggtagggatgatattactcccaatatcgcaggggatgtacactcccccgtgacattgtttctaataaccagggggtgagaggatgatattacgcttaataccgaagggggtgtacacacccttgtgatattgtgcctaatagccagggggaagaaaattatattaattttaatatttatggggaaaaaggatgatattactcccaatatcacaggggctgtacaccgaccttttgatattgtttttaatatccagaagagaagaggataatattgctcccaatatcagaaaaggtgtaaaccccttctgtgatattggtcctaatatccagggagggagagaataatattactaccaatatcacagaaggtgcccacccccaaggtgatattgctcctaatatccaaagataatagggtgatgttactcccaatatcacaggaggtgttcacaccccttgtgatattgtttctaacgtacagggaagggagaggatgatattattcccaatatcacaggaggtgtatactcctctgtgatattgattttaatattcggggggaaaggatgatattactccctatatcgcagagggtgtacaccctctgtaatattgatcctaatatccagggcgggataggatgatattactcccaatatcgcagaaagtctacacaacccccagtaatattgtttttactatccagggggaagaggatgacattactcccaatttcacagagtgtgtacactcaccatttgatattgtttctaatatctagggggagagaatatattactcccaatatcacaggaattgtacaccacctctgtgacattcttgtgaatatccggggaaaaagagaataatattactcccaatattgcagagcgtgtacacccctccatgatatcgatactaatatttttttaaagaggatgatattactcccattgtcacaggatgtgtacaccccccttgtgaaattgttcataatattctggggggagagcataatattactccccatatcgaaaaaggtgtccaccctccttataatatggttcctaatatccaggatattacttaatccaggatacttgtaataccctaaatatacaattgcttgaacctccacctcccaggttcaagcaattcttctgcctcagcctcccgagtagctgggactacaggggcacaccaccacacccagctaatttttttttcttgtatttttagtagagatggggttttgccatattggccaggctggtctcaaactcctgaccttgtgatctgcccacctcagcctcccaaagtgctgggattataggcgtgacccaccgtgccaagccaggaagaggatgctctatagatttccccaataagagatggctttgcagggccattccaaaatatgtcaaagaaatacatttggggataaaatactttgatttcctttagggaatgttatctattatgtgatgctataccagagtcaggttggagtcggttatcttattgcaacaaagagtctgttccgtcactgttgggatctctattttttcctcttatttcttgagacagggtctcactctgtcacccagtctggagtgcagtggtgcgatcttcattcactgaaacctctgcctcctgtgttcaggtgattctcgtgcctcagccccttaagtaactaggattacaggtgtgcgccaccacacccagctaatttttgtattttcagtagagatggtattttgccctgttggccaggctggtcttgaactcctggcctcgtgtcatctgcccacctcgacctcccaaagtgctgggactgcaaatgtgagctattgtgcccagccaggatctctgttttaatgttagtgctggtcactttgcatgaactccaaagggaagaaatataatgaggtgtgtctgaccccctgccttctcatcgtgacctgaattagtttttcaggtttgcaggggatacccttggacaagaaggggctctattcggttggttggggggattagaattttactttttgtttacaatatttctcctgaaagagttaggggctcacaaggaatttccgcgtgagcaacttatgaggaaagccatctgggaagatatgtgtccttgtgtcactgggatattctcgtttaccccaatgatacggcaatgacgcagggttgtgaaattacagctatgtgtttggggaaaaaagaaagcaggattgtgtgactacgtttccaaacttcacttgcccttagccatagtgagttgggggcctggagattctgttttctttcacaatgatatagatacaattaaatgtatagaaagcaaaaaaataaaaaggtgagtaatgaggaacctctgattcctgagtggccatgtagttacccatggcacagagccacagttactgaaggtaaagtttgctggggaatttagaaatgaatccagctcttggaggagtcagtttactggatgcctaagaaaatgcaaacaaaataagaaaaaagggtaatattcaatcccatagttattgttacctgtcatagctaaagtaaaattaaaacagagtgctggcttcaatcttgatgctacactaagcttagatttcagtgaatgtgagtctcagccactagctcagagccacctcccaaagaccaaatcatgtagggacaatagaaagtacttctgagaattgtggttaccaagaacctagtaactgttggggaggagcaaaacaaagtacagaaaccagagggtacaatctgagtgagactgctatcagcttctggaggagcctttactaaaatgaatgatgagagtaactggatgatgagagtaactaatggatgatgagagtaagcaatgtctttggttttcttttttttttttttttttttttagcagacgtctcactcttgtcgcccaggctggagtgtaatggcatgatctcgcctcactgcaacctccacctcctgggttcaagcaattctcctgtctcagcctcccgagtagctgggactacaggcactcatcaccacacctggctaatttttgtatttttagtattttctggtgagggtccaggtttccggaaacaactcagagacatatgttaagatgttatctttagttttcacagggaaccaaatatgttacgactccaatttccttggctattgttttaagttaccattaccttctcgttgatcaagttgctcatttacttctcaagcctagctagatgcctggaatttcccttgaaggaagtcaagattttcctttatctccatactggctgatggtgatcgagtaagcccctaagaggggtccctgctccatctcgagatgctgctagattctacagtgcctaataaacagctctcgcctggccgacaaagagctgcttgctctctggatagcaattccaaagtgaacagacaacatcctgtttggaagactgccactctgttagaagaagcatcaggaaaacctttcttttgagctatttataactaacagcaattgaccaagtatacttttgtgagtgaaactgacctttctccctgtaagaattctccaaaatttggaaactatttgtgagtatttttacttatggcaatataattattggcacaagctcaatcagattcggttttctttcgtaacaggaaccattggagatactcattactctttgaaggcttacagtggaatgaattcaaatacgacttatttgaggaattgaagttgactttatggagctgataagaatcttcttggagaaaaaaagactgggtatattttcaatatgctttccttttaaggtccctcacctgtggaaagtaaagaatgtcactttctgacaggctcaggaacctcaagttatgtagggatctcaagaagatgggggaattcacccagttcatacaggtgaaattgctgttgcaaagattatgaatatgagagaagtccagcatggctgacttcatctcgtgtctggcctcaggctggctgcccttgctcactcttgggcataggccaagctagccatgggaggaatttagtttatagtttaactttgaagcacggatgataatagtctctccctaaaatgaaccccttccttgctcagggactgaaactacctttgtatgacaaatgaaagcccacaagattaagattatgagaggggcctgaattctgctaaaatgcaggtgtagctgactgataacaagtcattgtcccacagcttgcctttctataatctcttgcttctcaggagtcacatggccagaggtcctgagatttccagtcctgtgacccccacccagagatggacttagtgcatgaggaccattttccacacccctatgatttcatcctcaaacaatcagcagcaaccattccctagccccctgccttccaaattatccataaaaatcctagcctctgagttattagggagattgattaataatcccagtcctaccccttgggttgctctgatttaattaaaccttctctactgcaataccacggactcagtaaattggttttgtctgtgcaatgggcaagaagaacatgttgcatggttatacaggtactacaagcacagtctgatggcaaattattggttttgcttcctgcccttgatgtttctaaacatctagtccaaaattacttgtgaaaggtccagcaaagccaattttaaaagaggctatatggccaatcactattctttctacacattattgcaaataatcaggccacggctgggcacggtggctcatgcctgcaatcccagcactttgggaggctgaggcaggatcacctgaaatcaggagttcaagaccagcctaggcaacatgataaaaccctgtctctactaaaaatacaaaattagccaggcatggtggcatgcacctgtaatcccagctacttgggagactgagggaggagaatcacttgaacctgggaggcagagattgcagtgagctgagatcacaccactgcactccagcctgggcaatagagtgagactttgtctcaaataataataataataatcagaccaagtataatgaaattaaaatttattttgcaaataaattggtcctactacaatttatccttcatagaaatgtggaaactgaagataaaaaaaattaggtttcagaagaaaactatactacacctgttattagattctagccctaaacattgtttttgaggtttttattatttacctgcaatttggtctaaattctgaattatttcctgactacaagtatccaaggaataaatgggttttctttttctttatgatagttttagttggcttctaatgcaacaacaatttttattgtaatcctgtgtgcattctattcctactattcaaattattaatgttatagatctttcattgtagtacttctgaattaaccaaaatcacagtattctgaagatgattctacaaagcctgctgtttctacaaaggctgctgatgatttctacaaagcctgctgtagtgttgctgtggcctctgcttaaaaaagtagaaaacacattgatgcagcatgttcaccccaacctccctgcctaaaggctcagggaccatcttggaagaggaaggcgcgtgagattgtaagagccgaattagggggatggagtgtggagaataaggacacttcatcttggatgctcacctgccaaattgacttctgatgaaagccagctccagaaatgtgcctacagttactactttcacctaaaccctgcccttagtcaaatccttctcttcttctaagcaatcaacttcaattccttgtataacccacagtataaaagggcttttataccattctatcctattgcatgtaagccttgggtctgggaggtaacagtgtgggattccaccatctcatctccctgccacccaaacatgcctgctcttctttaagcaatattaaatgtttgtacttcagaaatttgatttgtcagcctcttcttcagactctcagcttctttggcctttgggagtaaatttgcataggcctgctcaaaacaggatgttctgggggtttgggggtgttgttttgttttgttttttgttttgtttagagacagggtctcactctgtcacccaggttggagtgcagtggtgcaatcatggcacactgcagcctcaaactcctaggctcaagcaatccccccaccttggcctcccaaagttctgggattacaagcataagccaccatgcccagccctggacttttctttaaagacatttacacagtgtaggaattactgtgggtgcactgctcaggtccccttctccaggatgctcattcctacctcatagatgattttcctgcagagatttgacctcagctgaagggcagtcacctggtccaggtggttgctattcacctccttcctgagaacagccaacagccagggacacgctagcacagagatataagagcgaccaaggtgaggccccttctgtgctgcggtgcatgctccagagcctccctgggatcagacttaagagggtctccagccagatctggtcttcgctgctttcctcgagctccccagcgcactcctgcaatgcatcttttttttttttttttttttttttgagacggagtttcactcttgttgcccaggctggaatgcaatggcgcaatctcagctcaccacaacctctgcctcgcgggttcaagtgattctccttcctcagcctcccaagtacctgggattacaggcatgcaccaccacgcccagctaattttgtatttttagtagaaacgggtttctccatgttggtcaggctggtttcgaactcctgacctcagttgatcctcctgcctcagccttccaaagtgctgggattacaggtgtgagccactgtgcctggcccaatgcacctcttgaatcacctcctcatgctttgcttttagagaacatgatccccaacatgtgattccagcaaagattctagaaagccaaccgtgacaatcacttctgggtttagatgacccccccccaccacaagatggcagtgagcacctcatcacagaggtgctgatggtctgcagcaccgcgccaggccagaacgtgccttttacagaagaaaataacccagtagctgactaggatggtgaggagggctggtgagcactgcggtagtgagagggacactagcatcactgagatgcaagtgatggtcatttttcataggtcaaagctcaaagcaggggacagttacagggcagggcttcatagcaccagtgtgatgaaagtatctgggagtggctaaggccagcactatgccatgggaagcaaggtgggcctgaggaggaggcagcagcgtcagcctgcaacaagtgggggctgccctgcagagacctaagagtcatgttatagagcacagtgtctgtaaggccaagaagtgtggacagccaagtgtgtcaattactagacatactcaagaggagcaggaagggcagggcatggtggctcatgcctgtaatcccagctacttgggagactgaggaaggagaatcgcttgaacccgggaggtgaaaattgcaatgagccgagatttcgccactgcactccagcctgtgtgatgggagcgggactccatctcaaaacaaaaaaagaaaaaggaaaaagaaaaaaagaaaaacctaggtatacttctcaagcaaataaaaataatcaaaaccaatatcatgcccgggcacaaatttcatatatataacagatttaaatatatgagggtgattatcctctcatatctccatttttttttgtttttccatttttttctttactaaaaaaagttaatgccaatgacacacaatttttttttttttttttttttttgagatggagtctcacttcttcgccctggctggagtgcaatggcgtgatctcgactcactgcaaagtctgcctcctgggttcaagcaattctcctgcctcagcctcccaagtagctgggaccacaggagtgagccaccacacccagctaatttttgtatttttaatagagacggggtttcaccatattggccaggctggtctcaaactcctgatctcaaataatctgcccgcctcggcctcccaagattctgggattataggcgttgagccactgcgccccgcctatgtatgattttttttttaattttattttcataagtttttggggaacaggtggtattttgttacatgagtaatttctttagttgtgatttgtgagattttggttcacccatcaactgagaagtatacactgaacccaatttgtggtcttttatccctcacccccttcccaccctttcccccggagtccctgaagtccattgtatcattcttatgcctttgcatcttcatagcttagctcttgaacccttactttctgtttgagggagaagacatatcatctacaagtagatactgtgtaaacattccattgcatgactatcccataacttatttattatttgtgtttggttatttgctgctatgtaacaaccccactcccaactaaatggtgtgacaattccatgattctgtggatcaaaaattctgaaaagtcaaacccaaggagttttgtctctgctccatgatgctaaagcctccgcaggggtgaggcgaatggctcagggtgactgaaaagctcagggttggaacagctggggatgaggcctctatgtataagatgattcttcactcacaggtctgaaactatggtggggacagccagaaggctcggctcagctgggacagtcacctgagccctacacatgacctctccaacatggtgatcctgaagcagttgggtttcttacacagcatcacacttttcttttttttttttttttttgagatgaaatattgctctatcacccaggctggagtgcagtggcacgatctcagctcactgcagcctccgcctaccaggttcaagcgattctcctgctccagcctcccaagttgctgggattgcaggcgcctgccaccaagcccagctaatttttgtatttttagtagagacggggtttcaccttgttggccaggctagtcttgacctcttgacctcaggcgatccgcctgcctcggcctcccaaagtgctgggattacaggcatgagccaccgcgcccggccaaagctcacacttcttatgattcagccttagatgtcacatcagttcattttccccacacttattagtgttagaagtcacaagcccacccatactcaggggactggcacacagaccccactctcaatggaaggggtgggacaccaccattcctgctgatgggcatttgggtaacttcctgtttgaagctattaagattgggctgctgtggccgggcgcagtggctcacgcctctaatcccagcactttgggaggccgaggcgggcggatcacgaagtcaggagatcgagaccatcctggctaacacggtgaaaccccgtctttactaaaaataccaaaaaaaaaaaaaattagctgggcatggtagcgggcgcctgtagtcccagctactcgggaggctgaggcaggagaacggcgtgaacccgggaggcggagcttgcagtgagccgagattgtgccactgcactccagcctaggcgacagagcaagactccgtctccaaaaaaaaaaaaaaagattgggctgctgtgactattctagtaggtgtctttggtgagcgcctacacgtgtttctctttttctctttagtatatgcccaggaggggaactgctggctcccagataccgtatgttcagggtcacacacacttccacagggttttccaaagcccttgtaccagcacgcactcccagcacctgtgtgactgctccagctgtcccacagtctcatcagttctattgctgatattttcattttagcttaagttatatttaataggaaaattaccgttgcctctgccccccgttcctgcctgtaggagtttctcgtagctgttgctacaggtggccacaaatctgtcacttaaacccacacaaattgatgtccttatggctttggagtcagaagtgtcaactgaaggtactagcagggctgtactgacctggtggcctcagggagcatctgtgctgcttctccaccttctagaggctgctgcatccctcgctccagccccttcctgacaccactcaccctcctacttctgttatcacatcctcaccttctctgtgttcagggctccctctgtctctctcttgcaagcacacttgggattccattgagggccacccacataacccaggagaatttctccacctcaatatccttaacaactgcagagcccttttgccataaaagttaccattcacgggttccagggattgtgacatgggtagctttaggagtgattattcctgcctgtctcccgctcaccagaacttggactttctctctcaacaggagccccctgtgtgggaatagcctgtctcaacgacgccctctataaggacctgcttcctcaaaggacctcatagtcgggtcctgcccctcagtgtccagtctgccttggctggaggggctgcaggggtgtgttggcgccacctggtggagacagggcatcacagcaggtgggagcccagtagaagcacaaccaaaacatgggtaatgtttaaaattttctggctaagcgctgtggctcacgcctgtaattccagcactttgggaggccgaggtgggtggatcacatgaggacgggagtttgagaccagcctggccaacatggtgaaacatcccctctactaaaaaatacagaaaaattagctggacatgtggcgcgctcctgtaatcccagctactcgagaggctgagacacgagaatcgcttcaaccccggaggggttgccgagatcgcgccactgcactccaggctgggcgatagagcgagactctgtctcaaaaaaaaaaaaagaagaggggaggcgaggggaggggaggggaaaagggggaatttgtttggagctgagacatccatcttctcctgacctcagatatttgcactcctggttatgaagccttcacacttggactgaatacaccaccagctttcccgatttccagcgtgcaaatggcagatcgtgagacttctcagcttccataattacatgagccaatttatatatataaattgggtcctccagaaaaacagaataaattatatatataattatacgcataacttaattaaattatacgtataacttagctatatatataatttattctgtttttctgaagaaccctactgacacaaatgttgagcatcttttcatgtgcttattggcttaataacttgtacatcttctttggggaaatgtctattcaagttctttgcccattttgtaactgaactattaatatttgtctttacattgttgagttgtaaaagttccttatatattctagatactagagccttatcagatatatttctgcaactattttctcctaatatataggttgtgtttttattttctttttctttttttttttattgagacagtctcactctgtcacccaggctggagtgcagtggcatgatcttggctcactgcagactcgacctgccaggctcaagcaattctcccacttcagcctcctgagtagctgaggttataggcacttgccatcgcacccagctaatttttgtattttttagtagagccgaggtttcgccatgttgcctaggttggtcttgaactccctgcctcaaagcgatctgtcagcctcagtctccctaagtgctggaagtacaggtgtgagccacagtgcccggccatctattttcaatagtgttttttgatgtacacaggtttggaattttgataatgttcaattcatccatttttttttttttttttttggttctttctactggaccaccactcttgagccctctaatccaacctccacgcggcagccagagggagctctctaaatgtaattactctttccctgctccacctgctcaaaacagtgtcacatttgtgatttaaaacagtatttctcaaacctaatttgcaaacaaagcaggtggaactcttcttgtatgcacagcatctgatttggttggtctggcatgggtctgggagtgagcacacctaccaagcggctgctggggtaacttgcgttttccactgatgatttcagcaatgtttccggtcccacatgctcctccagaaccttgtactcccccatgaaaaggtggagtccatttccccttcctttatttatttttttgagacgaagtttcactcttgttgcccaggctggagcgcaatggcgtgatctcagctcaccgcaacctccgcctcctgggttcaagcaatgcttctacctcagcctcccgagtagctgggattacaggtatgtgccaccacgcccagctaattttgtatttttagtagagacggggtttctccatgtcggccaggctggtctcaaactcccgacctcaggtgatccgcccgcctcagcctcccaaagtgctgggattacaggcgggagccaccgcgcccggctatttccccttcctttgaacctgatcaggacttgacgatggcatcaacatggtgagagtgaccctgcatggcttatgaggctgggttacacaaggcgatgttgcttctgactggctccctctcaggatacatgcccttggaacccatcctctaagctccttgggagcccaacttagcccatgtggagacaagacagggagagaaacagaggcacccccagccctcagccagcatcaaccgccagacaggagagcaaatgcgccaacaatgattccagctgaagcctcagacagcgtggagcagagatgagggatccctgcagattgcagatgcgtgagcaaaatgcatgctgtcactgttttgaaacaacaatgtctgggggctgtttgttatgcagcaatagacagctgtaacaatgctgttactgctgtattccatgaatgactgcactttgagtagcagggggctagatcactagataagccccatggcttctgtgtatgctatttttctacttttatatccttttcattcactttttttttttttttttttgagacagagtctcactctgttgcccaggtgggagtgcagtggtgcaatcttggcggactgcaacctccacttcccgggttcaagcaattattgtgcctcagcctcctgagtagctgcgactatagatgcacccccatgcctggctagtttccgtatttttagtagagacggggttttgccatgttggccaggctgatctcagactcctgacctcaggtgatccacccaccttggcctcccaaagtgctgggattacaggcgtgaaccactgcacccagcctcattcactttctttacttggctcatttttccttgttgcctcaattctcctctaagatcactttcctgacatttcagcctgggcctgttgccttctctgggtcccctccgcctcctgtgcctcccccatctcagccttgatccctcagattatacttcctctgtccccaccctgaccatcttggctgtccctggatagggatgggtatcttctcccactggtctgggagatctggaaggacaggcctggaaaagacttggtcactgctggaaggagctcagttagtgtggtgctgaggacagtacgggtgaggctggccccttcacccaaactcccactctcttccatagatttcacctctgtggcccaggccataggattagggcaactccccttaaacatcgagtccatcctccaagctgtccttttttttttttttttttttttttttgagacagagtctcgctctgttgcccaggctggagtgcagtggcgcgatctcggctcactgcaagctccacctccagggttcactccattctcctgcctcagcctcccgagtagctgggactacaggagcctgccaccacacccggctaattttttgtatttttagttgagacggggtttcaccgtgttagtcaggatggtctcgatctcctgacctcgtgatccgcccgcctcggcctcccaaagtgctgggattacaggcgtgagccatcgcgcccggcctcatgctgttcttgaatagtgagcacctgttacaagtcgccccaccagcctctcacttgtacccccctcatctctttctccccaagagacagaggaccctggcacttgtgaagcatgacccagaccctggggccatggcatccaacatcctcattccccatgacccctactgtctagatgtagctgccaagagacccccagactccccgggcctctgtctagagtgccaagacagagagagaatgccctgccgcttgcatgctttgtggggtgtccttcccccttccctggctgctaggcgtgacttcaacgttctccccaacccccaaacagcagcactgacaccagctgcagacctggctcaggttagctaatgaggaccaggctggggatggagcctgaacccctaaaccccagtcctgtaccccaccctaatcctggggtctccactggacaaaacgaagcagcttggtttttcgttgttattgtttttgagatagagtatctctctgtctcccaggttggagtgcagtggcgtgatctcagctcactgcagcctccgcctcccgggttcaagtgattcttgtgccgcagcctccccagtagctgggattacaggcgcgtgccaccacacccagctaatttttgtatttttagtagagacagggtttcaccatgttggccaggctggtctgaaactcctgacctcaagtgatttcccagcctcggcctcccaaagtggaagcggcttatttttaaggagaaaactcccgtggaaaggaatcagcacctcctctgtcaacatttcacttctctgaaaagactctcacttccaacagaaagtgctttgtaacacaacaatgaggctgggcgaggtggctcatgcctgtaatcccagcactttgggaagctgaggcgagtggatcacgaggtcagaagttcgagaccagcctgaccaatatggtgaaaccccgtctctactaaaaatacaaaaattagttccgtgtggtggcgtgagcctgtaatcccagctactcaggaggctgaggcaggagaatggcttgaacccaggagatggaggttgcaatgagccgagatcacgccactgcactccagcctgggcaacagagtgagactccgtctcaaaaaaaaaaaaaaaagaatgagaacatatggacacagggaggggaacaatacacacaaacaaaatttagaaacaggtgaaaataattttagtaatatttttactaatactgatatgctcaaaatattattatttcaataagtaatctaaaaattattgagatgtcttatgttcttttcatcatactaagcctttaatatttggtgtgtattttacactcacagcacatctcaatttgcagtccccatgtttcaagcactaaataaccatgtgtgtccggtggctaccatactggacagcgttgatctgaaatcgcatctgtatgcatcaccagcatatttgcagagatccccatctcagcagcacacctgaggctcatctgcgaaagcacctgcaacttctctacaacctcccacatcacctccaaacacatcctcatgtcatctgcaaacacacccatagctcacaggccaatgcctaaatatcattgcaggcaccttcagagaaagcacttactaaaggggtatacttgattccacatctgctttgacctgcaaatctcccttctcctttacatacatttgcatctcatttgtatgtcaatctaaatccactggcagagcctcagatcatcatctcaaagtcaggtggatgtggggctgggcaggcctccaggtgttcctcctcctgcttcctctggggctcttgatcctcctcctcttccttgctgctctcctcctcctcctccaatatggtgaccagttcctcccgcagcgcccccatctccagccccaggctgcacagctgtcccagcagctggacatccactcggcgcaggttcccctgccagtaggaaggggacgtcacagggatgccaccccagagagcaaggggtctctccaggacctgggtgagagcaggtcccaactcatgtcctggccacagcgcctgggcagggtcctcactgtgcccatggaccctaactgccttcctgcttctcagagtgtctcttgatctctaactcttctctttgtctctccatttcattgtccctgacttctctctctctgtctcctccctctcttatctatatctgtccctgtttccctttgtctctgtccccatttattttttgtctttccatgcccctgtctctctgtctttatgtgttgccatttctctgcccctgcctttggctctctttctctcgcttgccctctctctgccctccccaactttctcaaattcagtctgtctctccatctctgttcctgctctccgtctctgcttcccacctctgtccctctcttttgggatctccctgtccccacctctgttcccgtccctcactctatgtctgtctctcggtgtctgtacatgcctctcatgtctctgcttctatctctcagattctgtttttcgatctctggccttctctatttttgttcatttccattcattctcatttcctctctttctctttcccttccaaacccctcactcaccagctcctccctgatccacagcagactatcgcaggcacctccagtgtctgcccctgcagtcctgagggtctgaccagggatttccactggggagacctccctcagggcctgggggggtgggcccagccccggaggcaccagtccagcctgattcagctgcctccacagttccatcgtctctgagctatggctgcaaggagcaggaagtagcaaggtccagggtggcctggtcccctggggagctgtgtgcgtggtggagagtaaagggcagagggagtgggatgggggttcctgggaaaggtatcccaaagtccactcttcagagagaatcagctggccttgtgcttttctttttccttctgaagtctaacctcaactctgctcacagggttcaaacatagcctcttgcagaggtctaactccacccttccctgcctgtctcaggcctgacccctcaggggcgctcagtgtctgtagatgcctggcaccctctgtccttccacctgccccccaccaccacttctccagcctctcctcagcctccatttgacctctggcttgcccatagcttggtccttgcttgtcctcttggcacgggtcatcctagggctttcccaccagtgtgcctttgggggcaggaatggctcccaggggcaccaagacagcaatcccttagctggagtgcctgtgtccaggctgctggcctagggccaagcagccaattctgctgaccctggacttgcctatgggtatattatccctgttgagggtgagggcttctgctgtggaaaagtctgggaagcactgcaggcctctctcggccttggacccttccttcagacccaaggtgcatatatatacatatatataatggtagatcacgaggtcaggagatcaagaccatcctggccacatggtgaaaccccgtctctagtaaaacacaaaaaattagccgggcatgctgccgcgtgcctgtagtcccagctactcgggaggctgaggcaggagaatggtgtgaacccaggaggtggaggttgcagtaagccaagatcacgccactgcattccagcctggcgacagagcaagactccatcttaaaataaacaaatgaacaatatatatatatatgtattttgttttttgagacagagtctcgctctgtcatccaggctggactgcagtggtgcaatcttggctcactgcaacctccgcctcccgggttcaagcgattcccctgcctcagcctcctgaacagctggggttacaggtgcacgccaccacacctggcgaatttttgtatgtttagtggagacggggtttcaccatgttagccaggctggtctcaaacccctgacctcaggtgatctgcccacctcggcctcccaaagtgctgggattacaggcgtgagccaacgcgcccagccccaagtcccttttaccatagaaagtaacatagtcacagtgcccagggattcacaggtatggggagagggttcgttattcagctgccacacccaccttcctaaacctgctgcccttccagtttcctcacgtgcacagccacgcccgtctgcttttagtttctcaatctgttggcttaaccttcaaaacaggcccaggatttgagcacttctcaccattccctctgccccatccccattcatctcttgcctagactgctacagcagcctcttttactggtcccctgcatccacccttgccctctaaggcaagggtccccagtccctgggccaaggaccagtaccagcccctcgcctgctaggaactgggccgcacagcaagagatgagcagcgggtaagtgagcattaccgcctgagctccgcctcctgtcacatcagcagtggcattagattctcataggaggcaaaccctattgtgaactgtgcgtgcgggggatctaggttgcctgctccttatgagaatctaatgcctgatgatctcaggtggaacagtttcatcccaaaaccatccccaccccacccccgacccccagtctatggaaaaattgtcctccacgaaaccagtccctggtaacaaaacggttagggaccgctgctctaaggtacattctccacctggcagaaataatctttacaaaatgtaaatccgattttgacactcccttcttcccactgtgaatagaataaaaccctaccaggcctgcaccgtcagcccctgcccacctctcaacccagtctcctatctctgtctgcaagctggttcccacctcaaggcctctctgctctagaggctacctctccctgcagcgcttttcccctagatctttgaatggctctttccttatcattcacttctacttcaatgtcacctcttcagagaggcctttgctgatggccctacacccagtcacttttttttatctgcttctcatcaaaattgccttgctgattcctttgtttcttattcatcctctcccacatccatcctctcccagcccagaatgttgacttcctgagagagggactgggtctgtcctgctcaccatggtaacctcggcatctagaacagtgcctgccatcacgtggtaggtgctcagtaaatattcttggaactaatgaatgaataattctatccacaagacttcacaatggctcttcatgctgcgatctagctttcaactccaaactggtcttgagatctcacctcagtctctaaccttgacatctaacctcttcacccactctcttacctgaccctaatttttaaaaatgacgtggtcagcttttcagccccctcattccctgtttttaggaggtagtgagtggaagctggaagaataagaaagcttggggagactgcaattgcagtcaggaaagaaaggtactctgccgggaagaacaccccatcttctcctagggaaagattgtggagtcctggggtttgttttgtttttcaattttttgttttaagagacagcgtctcgctctgtcacccaggctggagtgcagtggcgcaatcacagctcactgcaacttcgacctccccggctcaagtgatccccccgcctcagcctcgtgagtagctgggaccacaggcgtgcaccaccacgcccggctaacattttattttttgtggatataaggttgccctatttctttgtggagataaaggctcccctatgttgcccaggctggtctcgaactcctggcttcaagcgatgctttcgcctcggcctccacaaagtgctgggttcacaggtgcgtgagcccgacctgtgtctcgttttgaagctcagggagagggcgctgtgagcaatccctaaaccctttaagagtaaaaagtgcgtgcacctttaagaggacggttagaaaacgcggggcgtggccacaggagaataagttcgcgctgaaccaggagcgtgggataagaccggccccttccggttacgaaaccttagcaagatggcggctccctgggcgtccctgcgcctggtcgcccccatgtggaatgggcgtatcaggggcatccatcgcctgggtgcggcagtggccccagagggcaatcagaagaagaaaaggacaatactccagttcctgaccaactatttctacgatgtggaggctctgagggattacttgctccaaagggagatgtacaaggtgcatgagaaaaatcgatcttacacctggctggagaagcaacatggtccatacggcgcaggtgcctttttcatcctgaagcagggaggcgcagtcaagtttcgagacaaggagtggatcaggccagataagtatggccatttctctcaggagttctggaatttctgtgaagtgcctgtcgaagctgtggatgccggtgactgtgacatcaactacgagggcctggataacctcctccgcctgaaggagctccagtccttgtcgctgcagcgctgctgccacgtggacgactggtgtctcagccgcctctacccactggccgactcgttgcaggagctctcgctggccggttgcccccgcatctccgaacggggcctcgcctgcctccaccacctccagaacctccgcaggctggacatctcggacctccctgccgtgtccaaccctggcctcactcagatattggtggaggagatgctgcccaattgcgaggttgtgggagtcgactgggctgagggcctgaagtcagggccggaggagcagcctcgggacacagccagccctgtccctgcctagcctttagccctgtccccactcacgtggcttctcagcgggctgcatggaatgtctggtagctcaccacacttctggcttccatttgtcttcactcaacgtcagggtgggggagtggtgctggccaatcacaggagagagcgtgagttcccagtatttattcctggctgcccttggctaaaggtcacagctcctgtcaccctgtcaggcagccctttccatgcccctgttcaggcctggggaggtaaaggctcaggctgttagtagccgcagagagccacactcaccttgtcaggagactcttctcaaactgtccttatgtgagtgcactgccatttcttgcagggaccctgactgacacaggggctactactgacactttacagggatggttctcccccgtgcagggccgctgtgcccactgcaggacatgcagcatccttcgccccactccactcactaaaggccagcgcaccccaggccccatagtattgctggttatggatttattgactttatgttccaaattcagctttttcagttggctgttttttgaaaggggataagctttgtcagtagagggcaccgaacaggcattataggaggaaaggcgcctccttcgtggttcttgttggttgtgcttctgcctctggacgccgcagtgcatgtggcttccccagcacccagctcctgaagcaccaggcggtcagcagctgcccttggcaccctccagccctcagaagttgcgtaggagacacagcgcctccactgaggcacctctctgggaataacgttccccagcaccccaaatggatttccagtcaattcagaagcattttaccagtgaagccctcattattccagttcactgttaaagccagtaattctctatattaaactttccctgttcggtttatactccggagtataaaccgaacaggctatcagcacccctactagttctaaccacatgactcctcccccttatactaatagctagccaatcccacctatcaaaagaaaccacaacccgaaaaaaactatatattaccatactaatcctactacaactattcctaattataaccttcaccgccacc

SEQ ID NO: 735294 - DNA, 188384 bp, Homo sapiens
ctccaaggctgagggatgaggagacctgctgaggacccagggccttatctttccatcccactccataggtcccagtattgactgatgctgtcttcacctcctagcctcacttttaaccttctggcacccgcccaccactgtccagttcactattgaagccctgccgtccagtgctgcagagggaaaggatgttcttctactggcctgcaatatttcagaaactattcaagcctattattggcacaaggggaaaacggcagaagggagccctctcattgctggttatataacagacattcaagcaaatatcccaggggccgcatacagtggtcgagagacagtataccccaatggatccctgctgttccaaaacatcaccctggaggacgcaggatcctacaccctacgaaccataaatgccagttacgactctgaccaagcaactggccagctccacgtacaccgtgagtgattcccccatacctctgggtgctggcggtcagttctgcttcacacacatgagattgtcaggcctgggctgtgcctgcatccccctctgcattttgtcccgtgttgagatttgggcatttagtgcaggacacacacatggtaggtaaacttcaacagatcagaattcctttcctgcatccaggccctgcagacactgatggcgggggcgggggggcctcagcagggggaggtcagtctcagccaagcaccccatgccctccccatgaacctgaccctgagaaagaccctggagaactgggtcagggcctggcctgagggcgtcctgggaacctcacaaaagcccagcctcaggactcctgactccgtgtgaccccgggaagcctgtgtcagggctggggtgtggtctcctgggcagggcttactgggagcaaggatttaccagatgtctgcgggctgtggttcctgaagcttctcatcagtgagggctcagctcccagagtctcatctagacaaggacagagcctaccactttccctgggactcagcctggagagggcagggggacaggattactagggcattggccccctgaatgaggagcttaagagatgcccttgggcagtcagtggcccaggggtaggaacagaggggagaaaatgttcctggcagcttcttgtccaccggggatcatgcccaggggtgctctcccatggaggcaaataacagatgctgttgatgtgaacacctcctctgtgccaagcttcatgtcagatcctgtgaataatttaaagttcattcacagacaaagtggcaagcctcagaccattttccatttacatattgtatggaggggaaactgaggcacagagagatacagacaccggccacggtgggcagatcgcagctggcagagtcacatgagggctgtctgcagctgctgccacgtcctctccttcatccctggtgccttactaggtgtctgtggaccttagaacagccactggttcggatgttttcttcttaggtgtctacagctcggagggggagattctggtctggagagttatgagtaaatacagaattaatcagttttttcttaactaaatcacctgcctcaacaatcagtcagtgctggggaagttcaggcctcctcgctcaggtccacaccccgcatctctggacatgaaatggcttcgtgtgttttctgatgtgtgggtatcattccaacaggaggataaaggggaggactttgctttctctccccattcacaccctgcaccagccagggcccagtgtgagacacatactccgtagttctctcatgaaggagggagggaatgaatgaaggaatgatctataacctcttcagagacagagacctggatacaagatcctaggaggttctgggcccaacgtgagacacacactctgtagttctcttatgaaggagggagggattgaatgtaggaatgatctataacctcttcagagacagagatgtggatacaagatcctaggaggttctggccacacctgttttctgtccctctagagcctaagacccatgtctcattcatctggcccgtttctcctaaatctgcccctgggagctgagtctcatctgaccctggggctgcagggctgtgggaaggttttcaggggagggatcaggcttgcgggtagtcccacacgtttgccttacaccctggagctctacctggttctcactatgaatatcccataataatcccccctatcctttctggggagtagaaaaaaagtaaatatttaaaaatatgccagagcatctgttcttcttagcaagttcagatagttattagttagcaggaataaatcgttattttaccagagcctcacctgctgggggtttatgggagcctaactgactgaggggggtgggaaatatccaactccagccccctctagccatcatgtcccacctaaaggagagaaaaaactgagaggcacttgtgacattcacagcccagggcacagactctatccaggaccacagaacccctccctccccccactcaccaccgcatcactgaacgcctgctcacccaagttcctgttgcccagtacatcatgtcctggctttcaacaaaaactacaagacagactagaggcaaaaaaaaaaaaaaaaaaaatgcagttcgaaagacagaacaagcatcagaaccagatgcagatgtggcagggatgtggcagggatgttgaaattatcagaccaggaatttaaaacaactctggggccaggagcggtggctcatgcctgtaatcccagcatttgggaggccgaggcaggcagatcacctgaggtcaggagttcgataccagcctggccaacatggcaaaaccccgtctctactaaaaatacaaaaaattaggcaggcatggtggtgggtgcctgtaatcctagatactcggaaggctgaggcaggagaattgcttgaacctgtgaagcggaggttgcggtgagcctagattgtgccactgcactccagcctgggcaacagagcgagattccatctctaaaacaaacaaacaaaaaacaatactggctaatatgctaaaggctgcaatggaaagcatagacaatgtgcagaacagacggatgctgtgagcagagagatggacaggctaagaaagaataacaacagctactatatctatctatctatctatctatctatctatctatctatctatctatctatatatatgtatatatatgctagagatcaaactcactgtaacacctggatctcagagtggttgtgaggatgtttattaggagattaaagagattaaagcagagttatacacagggcgagagctcaactgatgctatcaactagtattcttatttttttgatgttgttattggcaataaaatcaggaacaatgcagtaaaaatttggttttatcatgtacgagttctgtgaccttccttgacttactgaggtactgtaagtctcagattctaactctgcagatggcggtgatgcccctctccctcaaggtgatgtgaggatgagatgagctgtaggtaggttggtgcccactgtgcctggcacatggaaggcccctgaaaatagtcaatgaacatcatccccgctcatcagcatggagttgacagtgagggctcgctctctgtgacaatcatggaatggaaaagaagaaacaagaggaagactgggcgcagtggctcatgcctgtaatcccagcactttgggaggccgaggcgggcagatcatctgaggtcaggagttcaagaccagcctggacaacatggcgaaatttcatctctactaaaaatataaaaattagcctggcatggtggcacaaacctgtaatcccagctacttgggaggctgaggcaagagaatcgcttgaacttgggagatggaggttgcagtgagccgagattgcgtcagtgcactccagtctgggtgacagagcaagactccatccaaaaaaaaaagaaaaagaaaaaagcaacagagggaagaggtgtgacatgagaggaagaagggatttaaaggtacaggagcagggcgaggtgcaagcacctgtgggagaatgtaggagttggtacatcccagtgtgtcaagtctgagacacagaaaatggtgcaaccgtggagagcaagggagtcagctatgaggacagcccaacagaccacactcaggctctggagcatttccttcctccctgactatgcccctgccctgcaatgccccttatggtttcccttggaacaaacttgggccttgtcccctttgccttcccctttctgcagaaaacaacgtcccaggccttcctgtgggggccgtcgctggcatcgtgactggggtcctggttggggtggctctggtggccgccctggtgtgttttctgcttctctccaggactggaaggtaccgcagcttttccccagcctcctcccacccctaggctgaccccagtcagggaggagggagaccccgccctgtattcagggccaggctttccgcatcctcccaaggaatccttccctctcattccatggctcctcccttgccagctgctgatcctaggctgcctcttcctttatgaatgtggcacagttaaggttgcacccctgagtgctgtcctagttccctaacacagcaaagccacagctgcctggagggaggaagggagggagggagggagggagataagacgggagtgctcagaacctggtaccttctgctgttcattgaatttacccacccagtgaggagggatttgcaggcttgagatccatggtgggggtcctgggcatggtcacgcagtggggagtggcaaagcctggacaggctgggtagggtcagcaccccatcgtgattgatgtccctgaggtgtgagatgggagaacctggacctcaggacctgctgtcctttatgtctcttgccaaggggtggagagagagaggacaaggccattgccccatttcagcatctccaggcctgaaaggagggtctggccatggcagggatactgagttctgggagaatatgatacatgctccttgcctccccatgcccccagctcccccagtgtcctgcacacacagccggccctgctttccctctggggccttgacccttcctctcaggcaaacgcaggtggtctgattccctccctgagtcctcagtccctttcctgggtccctgggtcaatgttctcctcacccggcatctgcctgggggggtccttcctctctggccaggacagacgtgactgcttaaggcctatcctcagctccccgtcctcggccgctcctaccacgaaactgatggagacaggaggccttcactccagtccttgaaaatggagtcccttccttgtcctttattctgcccctaaacctgtgatttctccctgcaccctcatgaataatcctgacctttcctagggccagcatccagcgtgacctcagggagcagccgcccccagcctccacccctggtgagtgtcccttcagcccaggtgtgggagcccctaggcctgccctacggtgtccactcctgccagtcaccccctgggggcctctgaccctttctttggggctgcaaggaggatgtcaggaaacatgacacaggggaccccgactgtcttgttcagactgatctgtgggctctgggtcgtgggtcacctcctcgacctcagctgctcaggtctcccctgggaagaggctccctctccctgattctctgggagctgaggacccctacactctcctgcaggaggggcccaggctctcctcccaccctgctgctcactcctgtctctgtccccaggccatggtccctctcacagatccaccttctcggtaagcctgttccctccccagcccttttctactggggtcccaacagtgcaggctcagggcagggggaccatcaaccccacagcacagcactgacccacctttccccagaacagtcaggtcaaagtgagtgcctccagccaggatccgggcctctctacagggccaggaccacccacgccatgtgctgacccctccccgggaccctctacacctgaggagaaccctggagtccagcaggtgcagaatggacactgggaccatcagtcagaggcccacattaacaagggtgcggggtgggcccagccaggacaggggtcagggtgttgtgtccacactgggaggctgagctcaggggcagagctggtcaatcctgaggggaaatgagtggaagtggaggcagggaagtaagtcctggccgatcagagacaggaaccttccaggctgggcttccgtgaccctccctccctgtcccctgacatctcctctctcccctgcccaggcccctctacccagccccagaacagccactcccatctatgaggtgagtgtgggccatggatgttctggtcccgcaggctccaggggacccaggatctgcccccaccagcacctggctgagctcagattcaggaaaatgcagtgaaaatgagaacaggtggtggtgagcagaggagggaggggcctgggaacagggaccccctgagcacagccaggttcagccccagagaagccctgggtgggcccagagcctgggagatgccagacactgttctgagaaggctacaggggttgaggcctcttctctgtttttacaggaattgctatactctgatgcaaacatttactgccagatcgaccacaaagcagatgtggtctcttaggttcctctgggagctgctcttgtgggttgatggagcgtccccaaagctcccagccctggggacggggaaggacatggagcctgagccagagaaccagctctgagtcctgaggagacacaggcctggggacagggagggatgggagtccctgctgaatatctggagaccctgacaggttgccctgggctctgggtgggccgggacaaaggcctctcatcaccacaggaagcgggggcttgcaaggaaagtgaatgggcctgtggcccacccggggtcaccaggaaaggatctgaataaagaggacccttcctctcattggctctttttctgctcacgggaacttagcagaaactcacctgaaactccgtgtccattctctcccgggtcacacagggaaaatatctccaccttgtctcaaccacagtctctcttccctgggaggcagaaataggggttgggagtcaggctggggtgggccctacacaggaaagggcaagattcacatgagccctgcccagccagccgagcgctcagctgtcctcacactaccccagggaccaaggccatgcacagccccagcctgggtccctctgtgaatgcatgtggggtctcaggagcacagaagatggggccatctgatgtccacaaaaggtgagcaatgcgggagcaaccatgggtggtataggttgcggctgtggcccctacgcagcctccagtgtcctgacccctgctgccctcttcacccaggccctggaggcccagtctatcactgtcctccacaaatgaacttacctgtccccaaatccaggatcctgtgtgcttatacctggccactaggttctcctctgtcccagtggctactgctcaggacatctttatccctggtggggcacagagaggggctgtcagagcaaccaagattaatacagacgcataattcagtccttgagcactacccaggactctggcccctcattgctcatcagttcccactttaccccctggcatggatctcactgagcaagccaactctttacacaggagcatccaggtcagaggtgcaggactcccccatctaaagctcatgcaggctcccatggcgatgggacaacctgtctgctcctctccctggcccacagccctatctcgcctgcagctcctccacacacctgggacagcagttctcagcccttccctgagggcccctggaagggtgatgatctcatataggttcacttgaaccaggtgccaccttcccacaagtgagctggtgcctgcactaaagcacagagccacagttcccaagagtgttctgccactgccacaggtcccaagagtgttctgccactgccacaggttgttcgtcctgagatgagaggtaagaaaacaacccgcaatgggttgttttatatcgggatttgcatcaggatttagctctaaatgacccctgatcccacctgcacacagcgtcagatgagacaaggtgaggcctctttagttttctgttgaggctgtgacaaattaccacaagcttagtgacatagaaacctgaaccaaagtgcccacatggctgtgttctttctagaggctccagggaagagtgcatttcctctccttttccacctcctagaggcctcctgcaaccttggctgtgtcctctttctccatcttcaaagccagcagcacagcatcttgaaactattctgtgccctgcttccatccccacatctccacctcctcccacctccctctctcacttaaaaggaaggagccttgtggttattttggacgcacctgggataaaccacaacaacctccccatctcatgatccttcctttaatctgtaaagtgtcctttaccacgtgacatgtccacagatctggggatgaggatgtacacatctttgagaggcccttgttctgtccatcactcctctcaaggccatcttctcatcatcgttcactacaaactacacatgggcacctggatgggttcatcatgactgtggcgtcagttcctgcattaacatccccagcaccctccagatcctgagagagggagacggagggctctccatgcccctagtacctctccaccttcttcttggtgacatgcttagttgctaagaataacagaaagcggaggtgactgaaagatcacaactcaccggcccttcaatagttcgtggacatcagcaccacggacagtgactcagtgaggctaatttccaggtggcagcagggagcatgcagataggagggaactgcaggaaaagctgcccattctattctatatgagaaagagtgtaagaaagaggaagctattacagggataatgctattcttctctaatccataaattgcgaaacctttgcatgtctggatatcatggtttttagcacatctgctgccactccctgcagggctgattgctgcatccaggatgtggtctcttggggggctcacagcctgctttggcctcatggtgagtctccctgcccctgacactcaggccactgtctctgcctacaacatggtgggaaccttccatgattaacgtctgattctctgtgcctgacctttgaagcacatccatcactcagcctggagcatccgctgagctcagcatcctgctcctccatccccagctgagcccttgaggagatgcttgagaggatctcctgggctcctctgtgagctcctccaggctgagccttgtgcttggtgtcagaggcctttgccatctgcttgttctttccataggcaaataatcctcctcagggacaagtggggcctgaagatctgtctgaatatctatctatctatctatctatctatctatctatctatctatctatcatctatctatatgtatgtatatatgagaatgctttattaggcaaaactgcatactatgaacatgctttaaaatgcaacaggatgagatgtgaagacataaagaacaagtgtgtagtgacacatggctatcagaacacactgaagaatccacaccgcggccgagagcagtggctcacgcctgtagtcccagcacttttggaggctgaggcaggcagatcacttgaggacaggtgttcgagaccagcctgaccaacatggtgaaaccccatctctactaaaaatacaaaaaatttagccgggcctggtggctcatgcctgtagtcctggctgttcgggaggctgaggcaggagaattgcctgaacctgggagacacaagttgcagtgagctgagatcgcaccactgcactccagcctgggagatagagtgaggctccatctaaaaacaaaacaaaacaaaaagaatccacactgcttccccgcttcactttacccagaaaaggaatgttctaggccacttcctcttcagcacacatccccagggaactaaaataggttcacagtcacccccatcttcctcattcccatcacctcttacccacagaggcatctctggtcctacagatccagccctgccttcaagaggcacaggtccaacccatccagtgtccctgctagtcacacacagcactcagggtacaatggagggcttctgtgctttggatgggaacaaaccccacctcacattcccacacctgagaagccaccagggtcctctctgtcctgtcctcacactcaatgtctgtcctgggtcacccttgtcatctctcctggaaataggcatggctcctgacaggtaggattgaggctttgtcttttcaggagtccctcccactctgagcacatgaaactgctcagctccatgcaaccctctctcaccaggggccttgttctctgggtccctgaatacctgggtccatgccatgtacattttaagaaaaatgacagtgactctcaccctgacatcctcacccaaggcacgtgtctgacaagaatcaccaggtgagatacctgtggctccacacacctgaggcttcactgcgcaggggtgtcctcatccctctcctcccacccctagggacagtaagcaccacaggctgccttggaccaccagctccccctcccagacacagcctcagatctatactgacatgctacatggagaggctctgatgaacagcaggtattaggaaatcccaccgaaccaggtgccacttgcggccccactcctcctcatatctgtgactgggacagacacacataacacacctctgttcaccgcccagcccccaaggtcaatcacagtctgcttctcccctagatccactgctccccatgtcttccgtcctcagctgcatcctgggtggcctccttgctgttcttgtaccccagaggcaggttccaacctttgtgatgttgcctgcaatgcccaaactttcccttccccttccccttcccttttcccctcccccttcccctccccttcccctccccacccctatcccttcgtcttcccttgtcttcccttcccttccctataaagccaaacatacccatccacctaccttgtggtcaaagtcatcagcctcctgctccactcagtgttctctgaccctgcatatggaggtggtggcccctcctagaacacccaccactcactgtcagccttgcgtggtaatcacagattttgcaggggttacctgtgttcaggtgtgtcacctgtggaaccagaactcttggaaggactggcagagggagctgcttaggatatctcagggctcctggcatctggtctaccacagggctattaacaacagcacttagggacaaggtggaggatggacggttaagagggtaaatatggatgatgtgtgggcaaagaataggacacaggaacacatgcagtactcaaataattatgccaagaaaggtgaggacatggagatggacattcccatatacttctgatgggactgcagtttagtccctacagcaacattgacctcatcatgtttaacgcgcacacgctctgaccactatcctacttctgaaggcctccctgtgctgtgagctctgagaaggccaagcttgcctgttctgtctctgctaaagccagagaccagccaatagcccagcacagggtacttcataaatacatgttgaaggaatgagctccaggaacagtactccacatggtagagatgtgtgtatgaggatgttcactgcagaaggtcatgtcaatgtgacaagtgacgagcagcctcaaatccagcaacaggggtgtgggtaaaagatcatagtgtagccatgcaatggaaccaatgaaaaaaccacaattagagcaaatccacatgtattaataaaggaggtgccctccatacatgctgcacctaacagaatgttgccaaataagaatgaaaaatgatgatatttgggctgtaaaaactagaagtcagctaaataagaatgcatcgaaagtatttgtgaatgcttacaattttataatgccttggcatccgttttggatggaagttggactttctcataccagaagcagggctcagtcacctttgaaatagtttccagttctccacctccttccagttcctcagtgtgattgatcagatatctgatttatacaactgcctcctggtgacctcctccctatgggacttccggatacagcccgtatgactgccccactgaccccacaccctgcctgctgcagtgaccacctctaattacctggatctcatgtctgcttgcattaaatccaccaattaaaactccctgaggacaatctgtttgaataatattctgtaccctaataaaggccttgacccatgggttccccctctgtcctccccatactgcccctgacctctgtgtgtgtgtgtgggtgtgggtgtatgtgtgtgtgtgtgtgtgtgtcctccagacagggcctgtatcccccaggacctgtaagtaataaatctttattttcatcttatgtctctcgcaatcattggcaagagctctgcatcttaaagatcgcaaatttaagaaattggtgtagtcggcacaatagagtacctcttctgtttagcacaagatatctcggagctgctgaggcttttaacatcctcgccggtgtggctgcctcactggtgaggccgttctgttcagtgcaattcagttgctccactgtgtgctgctgtgttgctgctgtagagtgctgccatgttgttctccccaaattgttaccgagtaggaacctgtaatgtgctcccaaggtggtctaccccatgagaagggggattctccatctagggcaagggctaggtgtgtttctggaatcctaatagggaaggcatccacagagggtgaactccactcctccttagagtgaggagtgacatttcccatttattttccccatggaggtgccatgtattgactttttctttcactgtcccaaggttgagccaaggtgagctatggagaccagggcaagataccatttctgttagcaaagcaaatgggtgacaacgtgtggagaagctgtggttctcctgatggatatagcagagtgccatttagtaaaatcttgtcaggaggctgcccctggttagaccggcagtgtctgtagtcactaaggtggatgcgaattttaggccctgggccatggataatccctgcagacacagccgtggcttcatgtgatggggcaatcccgggctagtggctcccttgtttctgcatttcttgctgtggttgcacaatcaacacctcaggggttgattgggtcaccttggaaagagaaacagctgcctaggaggctggtgcacatggaggccaccctcaattttattctgctaacaagttgtaagattaaaacaacagggggctttgggtaccatcaggaacttgtcaagtaaacatccaaagacagaaagaagaaaaagaaaaagacattaaccgtctagaaatacaagccattttaaagattttgcttaaaagatgcgcttgggctgggagcggtggctcacacctgtaatcccagcactttgggaggccaaggtgggtggatcgactgaggtcaggagttcaagaccagcctgaccaacatggtgaaacctcgcctctactaaaaatacaaaaaattagcagggcatggtggcaggtgcctgtaatcccagctacttgggtggagaatcgcttgaacccgggaggcagagacggcagtgagccaagatcgcaccactgtactccagtctgggcgacagagtgagacttcatctcaaaaaaaaaaaaaaaaaaaaaaaaaagacgggcttgtttcgtcgttgtggagtcatcccagagagaggctactccctagagtcactgaccacctttcctcctccatcttttcctcttatcattctagagacagaaaacaagaatctcagctttaggtggctaacctcaccccccaagaaaagaaactaccactttgattgactacaaatccaagaaaaataaaagagaaactttaaaaagtactgagcaaaccacaggtctagcaaacataatgctagccctaggttacttattcatttacaacaaacccctagatataggaggaaaaaataaaaggtaattaaatatatacacatacaatattttaatataaatatataataaatagttaaattatgtatgtataatatgtaactaaatcaaagtaaaatttcatactttgattctattggaaattcaaaattcatttattaacttatatattaaggaatttatgtaaaaaaagatttttaaaagggcaccaatttgcttttgtgtctctacaacataggatctaatttaactttacatttgctaaatacactaattgacaaatattcatggatttaatcaatactggggctcaaattgtagccacacgtgggaatcccataaatttaaacactctgtccctattatcttgagaagaaaactaaatataaaattgaaaaaaacaggtatgtctcaatttacctgtaactttgcctaaatttcccggagtcatatacccattgctgtaaaacattctctattggacataggtgctctgagacaataaataaaatagaagtgtttttggtacttagacattggcttgacaaaatgggatcccatgaaacctcagttaagatagtgaatacggcccaatgtgagttgaaatggggcctttaaggattaaaacttattacatgaaacctagtaagtaatggggtgattatccatactgcttctccatttcatagcccaattttgacagttgtcaaatctggaaaaaacaaacaaacaaacaaaaaaacccctgggaatctgttgcctcacagagacacaaagtagacatcaaaattgtatatctcagttccagttccaaaatggtggcatagaagcaagctggctttactccttcacacagaaaaccaaaaacaaatatacagcaccaaaattattaccagatatattccagaactcaaatatgaaaatgaaacagttttcagagccacagagaagtgaaaaaaactcccgacagatgacaaaagaatcagatttccccatctgtaatgtccctccctgccccattctgcctggtaccaggtgtgtggaaaattttaccccaactcatggtttctacactgggaaatgtaagatcaatgcgggcaaccagtttctgcacaatcctgggttccctgtccctgccttaacccacaagaagcattgtgagtgcccgaagggagaaatttccctgaggacagtcaaagagtggggaggcaggactaccatctccttccctggaaactctgctgtgtaactcagccaagggagacatgaaatcagactggtgtttcagcagctccatgttgtagtaggtttgtttcacaggtatcctgggcatggacatctagccagctttcccacactgccaggatatcccctttgggacctccctcagttaggaagggcacactctgatcatttactagggccaaggtaaaccctaaaggtaacttagagatgaaaaggaggtagtgacctagcagtaaagaactctaagaaaatctatccaataaaaatcaaaacaagccagacaaagactaaaataaataatgaatccttcaatgtaaagacctggacttacatccacaagaaacagtaagcaggtaaccatgatctccccacatggacaaagtgaggaacaagtgactgatcctgatgagatggtgatgtgtgagctctctaatcaagaattcaaaactgcagttttaaggaaactcaatgatcttcaagaaaacatggaaaagcagttcagaaatttatcagagaaatttaacgaagggattgaaataatttaaagaaaacaaacaggaatcttggaattgagaaatatatttgctgaacaggaaaatttattagagtctctcaacagcagaatggatcagaggaaagaatcaacccaaataagactcccccaaggcataaaataatcgaattctcaaaagtcaagggcaaagagaagattttaaaacagaaagagaaaagaagcaaatggcataaagaagctccaattctgtggcaacagattttcagtggaaatcatacagaccaggagggagtgacatgacattctcaaaatgctgaaaaaatattgacatttgagaatactttatccagtgaagttatccttcaatataaaggagagagaaagtttcctagacaaacaaaagctgagataattcacaccatcagactagtcttcctgtaaatactaaagggtaaatactaaatacttcaatgtgaaagtaaaaaaaaaaacactaacatgcaaaacaaccacaacaacaataacaacatttgaaggtataaaatccactggtgaaattaagtacgtagacaaacccagaatactcaaatagtaattgtggaaagtaatccaatcataactctagcatgagtctcaaaatataaatctatcaaaaacaataatacattttaggaggccaaggttggcagattccttgaggtcaagagttcaagaccagcctggtcaaaatggtgaaaccccatctctaccaaaaaatacaaaaatttgcagggtatggtagcacatgcctgtcgtttcagctatttgggaggctgaggcaggagaattgcttgaacccaggaggtggaggttgcagtgagctgagattgcactactgcactccagcctgggtgacagagggagactctgtcttaaaaaaaaatagctacctgtttggagaaaggtaatataaaatatgtaaatagagacaaagtcaaaatttgcaaaggatgaaattaaagagtagagtttttttggggggttttctgtttctattattttatttgtgatctaagataagttgttaccttttcttctcttgaagatactttgttatatctatgtttttggaagtcttatggtaactgcaacgcaaaaaatctatgatagatccactgaaaataaaaaacaatgacttaaaacatactaccagagacaatcaaccacaaggaagacagtaaaaaatgaagaaaggaagaggggagttacaaaacaaccagaaaacaggcaacaaagtggcagtagtaagttcttacttaaaaatattgaacactgaatataaatggactctattctccaattaaaaggcatagagtggctgaatgctgcctatatgctgcctacaagaaaccacttcatgtaaaaagatacaaatagactgaaagtgaagggggtggaaaaagatatttcatgcaagtggaaaccaaaagagagcaggagtagctatactgatatgagataaactacaaatcaaagactataaaaagagacaaagaaagtcactatgtaatgataaagcgctcagttcagcaagaggagatgccaattataaatatctatgcatccaacacttgagctcccaagtctcccaagtatttaaagcaaacaatagtggatctaaaaggagagatagactgaatacaatattaattaggggactttaacaccctgctctcagcaatggccagatctttcagacagaaaatcaacaaggaaacttcaaagttaaactacacactagatcaaataggcctaactggcatttacgggacatttcactaactatctaactgttacagaattcacattattttcatcagcacatagaacattcttcagaacagaccacatcttaagtcccaaaaccagtcagaataaattcaaaaaagtttatatcacatcaagcatttgttctgaccacaatggaataaaactacaataaatgaataactttctggacacatacaacctaccaagatggaagcatgaaaaggcagaaaaacccaacaaaccaacatgaaactgtaacaaaaggaaaacccaggaccgaatgacttcactgctgaattctaccaaacatttaataagaactaaaaccaattctactcaaaatgctttaaaaaattgaagaggatggaacactttcaaactcattctacaaggtcagcattatcctgataccaaaaccagacaaggacaggacaaaaacaaacaaacaaacaaacaaacaaacaaacaaaaaaacactacaggattgcttgaggccaggagtttgagatcagcctgggcaacatagtcagaaccaatctcttaaaaaaaaaaaaaaagaaaaaaattagccaggcatggtggcatgtgcctttagtcctagctactcgggaggctgaggtgagaggaccaattgagcccaggaggttgaggccgcagtgagccatgtttgtgtcactgtactccagcctggggaacagagcaagatgctctctcaaaaacaaaaagcaagctgggtgtggtggctcctgcctgtaatcacagcactttggaaggctgaggtgggagaactgcttaagcccaggagttcaagaccagtctggacaacatagggggactccatctctcaaaaacaaccaaccaaaacaaagccaaaaaagaacataggccaacatcactaacaaacatagatgtaaaagtcctcaataaaatattaacaaaccatgtttagaaacacatcaaaagagatcattcactatgattaagtgagattcatcccagggatgccagtatggctcaacatatgcaaatcaataaatgtgatccatcacattaaagagaaccaagaacaaaaaccatataatcactccagcaagtgcagaaaaggcatttaataaaagaatgggttgagggagtggagcccatagtcagagcagcagtggtctgggattttggaagtagaaagaagggcagcaccactggccaggaccaccagggaacacccccataggccctgggtgttgtgctccagggagggttccctctggagttattaatcttggtgtccactttgcccagctgcccctcacagggtcagggaggatgaagggaaagcttccttctaatgaaagttcagggactcacagttcctagagcctgtagggagaggaagatcttcgaggaagagcacctgggcattggggcgtttgagaggaagatctatgccaggtccaagtggacaacctgtggactctctctccagggacatacgggtatctgggaatctcctgtagcttaaagaggtaaagacctctccctttagcctgaggactggaggatgctggttcaggtgaatgagtcctgcaggggctggtacaggcctggagggtggtggtgtccagggccttgggttcacccttagcatgattcaggccgggcggtgtttcacatgagcaagagggcctgggttcattgcttcaggacaatggtgaaatctcatggtggaagaaatcttgtccttgccagtgcccagctttcatttggtcttggcccagagtgtcctccctagagaagactcttgtcccttcttcacactgcccttcagggatatgccagccttatgggataagatggggtggagactgtagatgtgggtgggaatctctccacagagtgctccttctctcagcggttgcaccttgtctcagggcttcagcttgaaatctgggatctccaagcccttccctccccagtcctggccaggaccacatgggcagatgcattgtgtgaagtgcatttcatttggggtgtcctctctgcatggcaccctcccgttgattctctttgcgcatgtcagagtgcaggcaccatccacacctcctgctggaggagggacggagctgttgactcctgagagctgatcatgtgttcccaccctcacacacaatcatggtccatcctctgagggacatgtgttgccaccactgtggagatggtgcaactgacagtaacaaacagtaaaatctggtactgaatgggaccttaagccaacaatgacaatgtcattccaaggtgtttcatttttattgattcaatgcaagtcacctgatttcattgactattcacaatagctcgataaagtaaatgcatcatcaccaccactttaaagaggaaaaaggtgcttgggcagtttgtgactactgtggtggctgctgcattgctctctggtaaagccaagtaggtggtgggtgcggcctctgggctgggatgatccaccctcctggtggtggcaggggagccaagctggagccatggcctgtgcagtggtagcagctgaactgaccgctgctgcaggatttgcaagctgttacattttgcgaagccatgaagcacataaaacctcaagtagaacaagtgtttcaaagtctaccaaaatctgccttcagagattattactacagaggtggatatgaacccaaaatgacaaaacgggaagcagcattaatactagataatgaatgaacactagtaatagtagggtaagccctactgccaataaagaaaaaaataagagatgctcattaacatgttatgctcttaaatcacgcagacaaaagagggtctccttatatagtagccacaatcaatgaagctaaagatttactgcaagatcaagctaaaaacagtaggtgtataatgaatttttaacttcatattagtttatgtatatgaatatcaagtttttataataaaatgcctccaaacaaagaatatttgatttagggtttaataacttctaagaggggactcagatgtttcctgtttcacagtcagtctgagagggtcatttttcctggagctgacctgggtggaggcctcacactgatactccccagcatcctctctcctgatggggtttatgctgagcatacagtggccctgggacagctccattctctccatgagtcacagacgctggtcatggaagatccactggataaggttccagagtcatctgtggggcaggtcaggatcacaacatccttttcttctgtgactctggtgttgctgactcagatggggtcggagccactgaccctgtggacaatcagtggaggtgctcaactgaaagtgggctgagggcacgtcttctcctccatccctgggtccttaaggtaactgtggaccccagaccaactgacacaggagctagaaagaaattatttaggaagttagtgagggtaagagcgtccttggcaaggtttcccctttaacaaaaagcagcccaagataattccttttctaacaaagagcagcctgaaaaattgagctacagatgtagatgagcaagatggaagcttgcacaggtgaattccagtaggtgtgccaatagaaaagggctgcctggaagccaggtatgttcaacatggagactccatcctcccttttctccattaccacatgtacagtaaaaaaccaggcaacatggcaccggccaggtagacaatccatctgcatgacaaaagatcagagtggggcagccagcaaatggcacagctggtctaaacaatctttcaccccctgtataaatcagacactgcctcctgaagctcatctataaaaccttctgcatttcactatggaagtggcaacccattttccccaggacccctctctctgtgcagagagctcttctctttctttcccctatgaaacttccactcttaacttcactctgggtgcctgcatcctagttttccatggccatgggacaatgaacctcgagtattaccccagatgaatgatgctgtttcacaatcactggttcagctcccttcttcttagggtttcacagctcggtggggagaataccacgcctcagtggtctggggagtgaggaacaaatgaagaattaatcagattttacttagaacgctatcacctgcctcaaccatcagatccatgttgggaatgtccaggcctcctctcttagatctatacccacttcactggacctgaaatcctgtgtttcccgatgtgttggtgtcactcctatgagaggataaaggagagaactttgctttctctccccactcacaccctgcacaagacagggcccaatatgagacacacactcgctcagtagttctctcatgaaggagggagggagtgacctcgagtgattctgccatctgtagtctgtgtaccctggccagtggctgtatcttcatatgcctcagtttcccctcagtaaaataggacacacaatgagaactaaaaataaaattctaattccccagtgaactgaaaggatggcctcttggccaagcggatcccagagttcctgatcatgacaggatgggaggttacacctcattacagcccctccctttggaagtttagaggtgacaactgactagcattaacgctaaaatcgagatcatgagactgacagaacagactctctgtggccataagataccaaattataaactcaacctaaggtcatgcaggcaagggctaagccacactttcctacatttaaagaataagctatgttctaacacagaattttctttctctctagcggctaaagtaacactagccttcgagataagcaatattgaaatgatcgcggctcatccaccaacactggctaactgacccctgttccaacagccacaactacacttcaattggacaggagactgatttcagtaactttctcctaataagagaccactgagcatggcctggttctgctggtatacagacacggtgcactgagtaccataatgcttgtttcatcttttgatgtataagacctaatttaatacatttaaatctgaattctccaccccaaagtgaacatggggtgcatgtagcatgcatgtttgttgatcacgcatgtgcgtgtacttcctttgtgagtatccatagctccacctataacctgttgaatatgtatacctggccaactcattcagcataaatctatcttccacattcccctcccttgaagtgcctgctattggtctctgctggaggctgcatcttctaccctggggaatggccagcctgcaggctgtaaccctgtgtaagaaataacctggttgggtgcagtggctcacacctgtaatcccagtggtttgggaggttgaagtggtagaatagtttgagctcaggagccagagactagcctgggcagcatagcaagatcctgtctcttaaaaaaattttagggaggagagtgaggatcagaaaaaatacctattggctattatgcttagtacttggatcatgaaataatctgtataccaaacccctgattacatatataacaaacctgcatgcgtatctttgaacctaagataaaagtttgttttaaaaactatctgggtgcagtggtgcatgcctatagttccagctactcgagactgaggtgtgaggagtgcttgagctcgggggattgaggctgcagtgaattatggtcccacctgtgagtagccacttcactcaaacctgggagacagagcaagaaccggtctctaaaaaaaaataaaaatagaaaaataaaatgaaaaatatatgaaataaagtctcctttccaaacgtacagatctccgatttttctgccaacaatgataaatggtcagtggcttgccatgttgtctgtgaattacttttaaaatattcacgatcacctgacctaaaggttggtaccaaggaaccgcctgaatacaccgtctctgattatttgcctccaacagagtgttccctgggcctgatctctggtggacaatgagctgctgggaacatcctctcttctctattcctcccctggggatgctgaccttcccttggagtctcctaagttccccagggcagtcggctaatgtcctagggagcttacctgtcttctccataccaagtctcatgtgaaggacgaggctttgcccttgcccagatgaggctctgggggctgagccctggctggctaccagctgcaagagccatggcccttggacagctggtaaatccttgttcccagtcagccctgcccaagatgcctcaacccagccccggcacaggcttcccagggtcacatggagtcaggatcctgggacaggggactggacaggggtttccagggctgagtttctgaacaggggcttcccaggggtcccctcactccaggatctgacatggtcctacaaggaacgtccatggggaggggacccaggagggggaactgacactgacctccccttactgagcctccccccaaccccatcagactgtccttcctctgtagcaagtgcctgcagggtctggatgcaggaaagaaattctgatctgtggaagtttgtctcccctgtgtgtgtcttgcactaaatgtccaaacccccaaatgggatgtaatgtagagggggacacaggcacagcccaggcctgaaaatcctgtgtgtgtgaagcagaactgacccccaacacccagagctcatgagacatcactgtgtacgtgaaactggccagttacttcttcattcacaagatctgtttttatgacttgtagggtgtaggatcctgtgtcattgttggtgacattctgtatcagcagacatgtattggggtatattgtctctcagcctctgtggcaggtcctggggtaattacttgagttcctagtacatatcctgtaattcccctttgtaccagttgtagccaagcctaaggcagattgtgggtgagtggaagaatctccttgccttctgcagcttcaacagtgacttgggcagtggtaggcaagttccagaaagttaaaagtgaggctaggagtggggagagagcatcagttaatactgggccctatgcattgaggtggaaagatggggccctaggtcctggacaggtctcttcatccctcagccttggagtgtgtgtgtgtgtgtgtgtgtgtgtgtgtgtgtgtgtgtgcgcgcgcgcgcgtgcgtgcgtgtcctactgggccaaggtcagcagcatgacctcccttccttcagtgcctctgaccttggcatttccctgtttggagtccttttccccaggggtctgcctggctccctccctactgccttcaggtcctgctcacattagggcatccttgggagaccccttccctgacacctctagagaccctgggtcttccctttctgacctttcgctgctgtgttccctccagggctcttgtcaatacttgacctcacattctagatacccttgcatgtctgtcttcctccctatgagagcatgagctctgtgagaacagggacttgtgtgatcttggttgcaccccagtgcctgggacaggctgcggactcctgtggatgagctcatgagtgttcccagggcccttcacaacgtgggatttattttccaatggctgaggttgttggctaagagctctgttggagttcaatcaggctggtgggaaaaatattagagatagttatagagatagacacaaatcttcttggaagaccaaaaagtttgcataactttggtaatagatctgactgaaggtggtccctttacctttagttaaacaaattaaagtagtaacaaaggaaggcagagtagtttgtctagccagcttgtttactcatgtgatcttaagactaaccattgatgtgccacaggtgcttaattgctttctacttgggaagtccacaatgtcaattaccctctaacggtgttgactcaagcctttgttaattaatcttactgaataaatatgagtctcactagctgatcaaggccatggtcacaactgtttataggactcagcagggagtctgtaagcggccctgacagactcagctggactggcaaagcaaaatatgtgtgtgtcagtgtacactattcacccgtcccccacagctggtgcccctatatgaggagtgctgccacagagctctgtttagtgtcccttgttttttttcttgagtattaccccaacttaaattgtgattattgtcatctgttttcaacattaactgctcagtgatgattcacttggaaaacattaacaatcgagattgtttcttcactaacaacctcagattatttagattttcctgttgtaatcccttcttcctgtttagtgtccaacagaagccctctgtccctctcaggtccccgttctctccaagaaaccccagccagtctctgtgctccctcctcccatccactcccagggagccctcccctcacctgtgagcagaagcgcctgccagggatgtgcactctgtgaggaggggctgagggaggccccatgggctctgctgtctgctttgtcctcctctgtggagaggagcttgggcttcagaaaataaggaggccagaaagtaaggaacaggctgagaaataatggggatgtgtcgaaaggtcacagatgccaacatctttgtcctatgcaatattatccataaaattacaggtttgagatatgcttaaattttcttctaacatgcattaaaataaacatataacttttaatagttatattaaattgtatttaatataaattaaatgctcttgtcagagctactgtgactgtcagctctgctgtccttcctctctctgtgctaagcctcctcccagggcagaagcacttcccagggccaggggtgggggcggggaaaggtaagtggcaatgaggatctgcacaggtagcctttccgcctcctcccctctcagtcctgcctccttgtcttcttttcctctttttctccaatctacatttcagttccttagaccacgctgtgagaagcaaggcttattgggacccccatcccttaacaggatgacctgtgctccccataagtgacctctgctgtgtctagggattggctctgtcagcacctcacagagagtccctggggcccccaaactcagtgttattttctctatgacacagaaacccctctgggtatgcaaggttttcctcatgttttctaatgtctgggaaggttggatttactcccagcagggaggtcacagagatgtccagggagtggggtcctagaaatggacaaatctagagctaaagcccaggtctacgattttcagttgtttttttctgcagtgctatgtgaccctaatttcctaggagtaactaaaatgcaaacctcagacatttgtagacattttatgatttttctctacagcttgtaccactgttattattatttgctttatgctttttcctaaataaatttactttacaaaacatccttgtcctagtagggtgcaggggctcacgtctgtgatctcagctgcttgagaggttgaggtgggtggattgcttgaggacgggaatttgagacaaaacatctttgtcctatgcaatattatccataaaattacaggtttgagatatgcttaaattttcttctaacatgtattaaaataaacatataacttttaatcatcatattaaattgtatttaatataaatttatatacaatacatttttatataataaattatatatataaatgtatatataatagtttttcttttttgagatggagtctggctctgtctcccaggctggagtgcagtggcacgatctcagctcactgcagcctccgccttctgggttcaaacgattctcctacctcagcctcccgagtagctgggattacaggcgcctgccgccacgcccagctaatttttgtacttttttagtagagatggggtttcgccatgttggccaggctggtctcaaacacctgacttcaggtgatatgccgcctcggcctcccaaagtgctgggattacaggcatgagccaccatgcctggcctatatattttatataattatataaagttttctataataaattttatataataatatataaaatggatatttatttaagataaagttattagttttatatatttacatatatttaggaataaatgtgttactgtgggagcccagtgcccaggcaggtagtcagtacatgatggttgtcattagggttaatactttggaattctggattttttcccaagagagtgtctacgctggaatattgggcttgtggctttctgctgatgtgcatgtgtgaagaagctacttccacttattaggacttgtgtatctgtctcgcagtttcactacctattttctcgtgatgttggtcaagtcgcctaacttttctgtgcctcatttacctaatttgtagaatatgggtaacagtacacaagtgtgagtgtgtatttcccaggactgaccactagagggcgtgaaggcaccggcacttactattacagcaatgggtgtagtagtgctcatggtcgtaaacatcattctcccatgaaaggaaccagggcttcctgggagaaataactgattccagggctggggccggaaagcacaagcggagcctggagcatctcgtgaggccagaaagtaaggagccggctgaaaaataatggagatctgtcgaaaggtcacagatgccaaccagaaggagctttgaatgaccaattttgagacaaaatgagcactataagaaataatgatagtaataaattccaacccataaatacccatgagttcctactaatataaataaataattgaatacataaatatataaggatgaagaaacagctttttcttacagcagaattccaattaatgaatgtagaaggaatgatcaaatagaaaatcactatttggctaacagcacagtcaattgtttgtaggcaagaattatcaatggactttaaatatgaatgggtaaaagtatgatgatgctacaactagtgagtaccaagggggaaaaaaaagtacgttgagaagaaacaggctacttccatattcccaaagtatcacttcaggagctacttattgattataatgggacaaatagtaacttacagtagagaaacctggcaacagagtctctccgaggtacaaaggctctcttcaggaaggaggtaaggggaaggaagaagaaaacactgtcctgcctcaattatttgctttccccattctcaagtgtacttcatagacattcaaagatatgtgttgatagtgtccacgatccacatggctctattatagtcatttattcacacatacattcagtgaggctttgagtgcctaatgtgtgcctgatatttgctagatggtggatgctgagaagatcaggtgtgctgctgtctctagggtgactgaatccacctgccccactttacagatgtggaaattaaagtgaaaaggatttataggattagttcactgtcacaaggtcactagccttaaagttacaggagtaaagcaagtttcctgacttgctagattttctgctgcaggtgctgacaatggtgagctccaataggagagaggacactcagagtgaagtgggagccctgaacaccctggattagccaagaggacatgccgggtccagctgtgaccgcacaaaggaccattggggatatttgtattctctttttcacttagagcttgaaatgaggaaaactaagtgcagaaaaccaagagtggaagatttttcacaaagcactggtaacatgcatcagaaaaccctgtgctgatgtctgtcacggtgtttctcactgaacggtaatagtctggctttgagtgtgttccctctacagcctggagttctgcgaggcagggaccaggtgtgattcatctttgtctctccagtgacagtacacagcaggctctgataaatatttcttacaaaataaaatggaataaaaagtagacatctgcacaggtgtgggatgactgagcagcagcagaagcaggaaaagtcagcgtccccagatcagctgatgtggtgttcggattctagataggggtgaggtgccaggatggggatgggggtcctgtggctctgctgccctgggggacacccctaggtttcacagtgcctgctgtggttgctgcactttgcttccccatgggaaagtgatcagagggtgtggggcttcaggtgaccccatgtgggaaatggccaagggaaggtggggtgggcggcacatggttttttttaaccaatatttgaaggtaggttgtatgaaaaggtgttaggcttatttcagcttatggggagtaggacagggattggtgagtgtgtatcaggtatattttggctcaggatggaaaagaactgtcacagtaacataaggtcttttgggaaattacatgtttactggcagagttcaggccagggctgggtgtctgaaaatacctgtcagggtcacttttatggttacaagggcagagcttggcttggaaccaggtttcttactaataccacatattaagtattataaaaactgtcctttgcaataggacattgctctatgatgcaggttgaggtccctctgtttaagtaattgtgggtggctgtgattctctcatctagtctgcgacttggacttcacctccatctgcagtccctctcctttgctgttgacactggtcagagttaagcgcatttactgacgatggtcacagggtggcagcactgcctctctggtattttctaaaacctcttcctggaactgagccagtctaagaggatgtcatgactaagaaaagggcactaatgaggtgaacagataattttttttttcttgtttctcctgtgaagtaacagagtggaggtgagcatggaataattgccttttagaaatggaagacaatggagagaagtgtttcgcaaaccttaatgtgttcacagatcccacacagatctttttattcaatacagattctgatttttctggtgaggcctgagattgtgcatgtctaaggagcttttggatgatgccattgctgctggttggcggaccacactttgagtagcaaggctcgaagatcatttagaggttaattctcactgcatctaatttatggatgaaaacaaaccaaggtccagagagagcatatacagcttgcctaacaaagccattccctaagtgcctgacttcttgcatttaaacccagggcttcagcctttgtccagttctcactccacacatcacacggtttgttcactgttgtgaacgacagttgtggcagcatctctttagtttaggaatccagagccccaatttcactaccctctttggtcttggctcatgctgtgacttcgaatagttttgcccttacttaaaatcttcagtggctcttttgtaatcacaagatcaagttcgaatatctctgtctagtgttcatggctttataacatatggtatctctttagtaaccttacctaacttccctgttttaaaattgtctcttgctgccatagccctccttgctccttcctgctccctaacaaactgtgttcacttctctctcagtggtagtgatgatggcatggcctctgatgttagactcatgtaacttctaatcccagatccaccaccaacattggcaagttgattcatctttctgaggataagcatcctcctctgaaataaacttagatggcggttgagaggggtaaataaaataacacacaaacccactctcatccctgagaccctcttcaaaactagcatataaaaatagctatttgaagaggttcagtgaaattcaaggtaacacagagaaggaattcagaatcctatcagataaatttaatagactgaaataatttttaaaaatcaggcagaaattctgtagctgaaaaattcaattgacaaaccgaagaatgcactaaatctttcaacagcagaattgatcaagcagaagaaagaatttgtgagcttgaagagataatatatgaaaactcagagtcagagagacaaaagaaaaaagaattaaaagaataatgcatgcctacaaggtttgattattaagctactcaaagagatacaagagaagggtgaaaaccaacataaagaaatgtaaaaaacaatcagaatataaatgaaaaattttctaaaatgctagctagtttttttttgagacaggctcttactctcatcacccatgctggagtgaagtggcacagtcatggctcactgcaggctcaacttcctgggctcagatgattctcccacattagccttccaagtagctaggactaaaggcgtgtgccaccaggccaggctaattttttgtatttttagtagagatggggttttgccatcttacccagggctggtcttgaactcctgggctcaagtgatccaggagattcactgccaaaaaggatataaccaagtcatatagtcataggttatctaaagtcaatgtgaaggcaagaattctaagagcagtgagacaaaagcatcaattaacttataaaggaaaacctatcagtctaacaccagatttctcatcagaaaccttacaaaccagaaggtattggggtcctaatcttttggcttcttaaacagaatagctctcagccaagaatcttgtgtagagtgaaattatatttcaaaatgaaagagagaaatacagtctttttcaggcaagcaaatgcttcaggatttgtcacggctagaccatcctacatggaatgttaaagggacttctaaatcacaaaacaaaagatttaaatagaacagaatagaacctcttgaaaccaaaaaattcaaatggcctataaaacaataacacaataagaaaacaaagtagataacgatcaacatgatgactggaacaaatattaacattgaatgtaaatgacctaacactccacttaaaagacacagattggcaagataaataaaaaatcacaaaccaaatatcagctgtcttcaagagactcacttaacatgtaaggattcttatagactcaaggtaaagagatgataaaagatattccatgcaaatggaaaccataagtgagaaggaatagctatccttatatcatataaaacagactttaagcaacaacagtaagaaaaagacaaataaggcaactatataatgataaaaggatcaatcaaacaagaagatattacaatcctaaatatatatgcacctaactttggagctcccacattcataaaacggttatgatgagacctaagaaaaaagatcaacacaaaacagtgagggtgtcctgggttttctttttattggacagcagtgtactagcctatcactttcccagtcaggggatttttggtctccccattcccctaccatgggttcatgccaaagtccatattttttattagtgtttggaattggattttttttttttgaggtggagtctcgctctgttgcctaggctggagtgtagtggcacgatctcggctcactaacctctgcctcctgggttcaagcaattcttctgcctcagcctcctgagtacctgggactacaggtgcatgccaccacacccagctaatttttgtatttttagtagaaacgagatttcaccatattgtccaggcttgtatagaactcctgacctcatgtgacagggaaacaggcactcagtgaacttcatgcgattgaggagttaatgataatgagagaagggctgtgaggggacagcactggggacaccagagcctgtgacgggctgagttgctgtgccttgggagatgcccttttgactgagccctgggaaggagggggtgtgggggcaggagctgcctgcagagggagtggcctcaggtgggcggccacctggctgcagggaagaggtgacagagttcgtgtgcagagcttggagggtgaggaggaggtgggttgaggtgaccttggtgagggtgaaccatggggggctgtgggccctgctgagggaggccagccagccctggacctacagggtggtttggtcttttttgtcccattcccagcatccactgagtggtgaaactctgcaggccagggaccatcccactggccagaaggagcgcacagtaggtgcccactcagtgcatgttgggctggacagaacctcactctgccccctgcccccagctttgggagctgcagcaaggtccctccccctagggatctccatgcctctgtctctgaggggtgagatggggagacttcaaagggccatctcagagtgtgggggatagagacgcagaagtgtgggggatagagggaggcctgggctctagacccaaaggaccttacacacctcctgagtcttttcaaatggtttcttctgttactttaaaaatgatgtaagtcatcatatttattgtaaatcccaggaatctaatcatgcgtaaaataaggtgtcttatccttgaccccaccccttccccaattaaatttccaggatgttaccactgtttgcagttggtgtgaatctctctttaataatactctgtttatctcacttgtcgttttacgccaaaatacccattgaattatattattgctgaagaccattcttttttttttttttttttttgagatggattcttgctctgttgcccaggctggagtgcaatggtgtgatctcggctcactgcaacctctgcctcctgggttcaagtgattctcctgcctcagcctcctgagtttctgggattacaggtgcacaccaccacacctggctaatttttgtatttttagtaaagacagggtttcaccatgttggtcaggctggtctcgaactcctgacctcatgatccaccctccttggcctcccaaaatgctgggattacaggcatgagccaccacacctgcccagaccattctgttctactgaatcatgtgtggtgggcacctcttatatcaatacatatggattttatcttgtgtttgttattggctcccctttttctcattgcatggctacactcaatgctttgtccacacccctgttcctgggttggaatcttgtgacagaaaatgaagtaacaaaggctaaagctttctaaagtggagtcaggagattgcaagacaattgcactttcaccagcaagagctcaaaccacagaatgttccaatagatttggataaacagctgaagtcagtattcaccagccttcaacatctcaactaggagaaccctaaaattaactaagcacatagaatggaatggacttgtgatttaggattccttctcagccaatgagctgcttctgaaaacaactttttgtggaaattacctgtaaagaaaaccctctcctgtgcttgtcttacagaacactagtcagggctgccctgattcagtggacccgaattgctattatttgtttcctaaacatatggtattttctgtgaccttcatctcaatcttttttttaagttactgggctgtttcccagttttcataatgacgagacattctgcagtgtttcatacacatgtcttttccccatgtggagtattgatccaggagctcattcagtcaacgcatgtttatgaagcatcctgtgccaggctgtgggctggtcactgtcttcagcagagagaggacaggcacagtcttgccttcacagagctcacagctcagggaggctcttagaagtgggatactggtcggagcatgtgcacattaaacatgatgaggtcaaggttgctatagggactaaaccacagtcccaccaagatcgcattgagttcctgtggtagaccagaggtcagggcccctaagatgtcctgagcagctccctctgctcagaagttttggttccacaggtgacacacctgagcacaggtgacccctgcagaacctgtgattaccacccaaagccaagagtgagtggtgggtgttctaggaggaaccgtcacctccatgggcagggttggggaagactgaggggagcaggtggctgatgactttggccagaaggtagggggatgggcaggtgtgcgctcatagggaagggaagagaagggagggcattgcaggcaacaacacaaaggttggaacctgccttcatggactgagaaaagcagggagtccacccaggctgcagctggggagggaagacatggggagcagtgggtctaggggagaagcagactgcgattgaccttggggactgggcagtgagcagaggtgtgttatgtgtgtctgtccccatcatagatatgaggaggggtgaggccgcgggtggcacctgggtcggtgggatttcatagtgcctgctgttccctagagcctctctgtatagagggtcagaatagatctgaggctgtggtctgggggaaggggctggtggtgcttaccatctctaggggtgggaggagagggatgaggatgcccctgagcagtgaagcctcaaggtgtgtggagccacagttgtctctcattagacatgtgttttgcgtgaggatgccagggcctggtggttattactgttgtcaagtttgcatgacaaggacccaggtatccagggatccagagcacagggcccctggtgaggggatgaggctcagatggggctgaccaggttcatgtggtcagagtgggagggactgatggagagacagagcctcaacccctcctgtcaggagctgtggctatgtccaggagagatgacaaggatgacccaggacattgagtgagtcattgagacattgaaggtgaggacagggcagagaggaccctggtgactgctgaaatgtaggatgtgaggagggctctgacccatgcaagttacaggacctccccacccccgagcccacagatgacccttaaattgggcatcctgagtgctgtgtgtgcccagcagggacactggataggctggacctgagtctctgtaagggcagcgctggtctgtaggaccagagtcttctctgtgggtgtgacgtgggcaggaattagcaagatgggggtgacaaggcttggcttggaggatctggtacagaagcccatgggcttggtcagctcagcttctcaggggctcagctggggctggaggagcaggatgctgtgctcagggcatgctccaggcagcgtgatgtgtgtggttccagggtcaggcacgggggtcaaaaattaaccatgaaaagttcccaccttctgtaggcagagaaaatggcctgattgtcagggtcagggagacttaccatgtggccaaagcaggctctcagcctcccagagaccacaccctgggtgcagcactcagctctgcagggtatggcaatagatgtgccaagaaccccaacatccagatgcatgcaaaaattttgcgatatataaaatagagcagatcaagtttccctgcaataacgttgttcctggttgtgtctttttcttgtaaactagacatggacatctttccagcagtctgttctcatctgccaccttcctgctgcagcacctcagaatgaacattcctgagacactgtccgtggtgctgacgaccaagagctatggaacagagtgtgatgtagaatcttctagttacctctgctctcctttcacttttaacaacagagcatcattaacaatgagaaggtggagaggtgttcaggatcttgaagtgacttctgtcttgctctcccataaccctgaagctgctgtagacattattgcagaaactgacaccacagtcaggatggccttgtccaggagcccatgtgcagtttgtagtgagcaaggatgagaaaatggtcttgaaaggggtgatggacagaacaggggcttttcaaaaatgtcacatcatcacccccagcatccgtgaatctgtcacatggtaagagaccttacagattaaatgaaggattatgagtttggaagattattgtagtttatccagatgggtccaacataatcacagaatcccttccttacaaatgagagagggaggtgggagagtcagagaaggaggaggagatgtggggatagatgcagaagacagagcggtgtcaagatgctgcactgctggctttgaagatggagaaagaggacacagccaaggatgcaggaggcctctaggaggtggaaaaggagaggaaacgcactctgccctggagcctccagaaagaacgcagccatgtgggcaccttggttcaagtttctgtgtcacttagcttgtgggaatttgtcacagcctcaacaggaacctacagaggagtcaccttgtgtgcaggtgggatccagggtcatttacagctaaatcctgatgtaaatattgcaggttgcttttcctacttcctatctcatggccaacaaccctggacaatggcagaacacccttggaaaccacggctctgtgctttagtggagggaccagcttgtttgtgggaaggtagcacctggtccaagtgaacctacatgagatcgttactctccccagggccctcagggaagggctgagaacagctggcccaggtgtgtggaggagctgcaggtgaggcagggctggaggggcctgtgggtccaggtagaggggcagacaggttgtcccatcgccatgggagcctgcacgagctttaggttggggaaccctgctcctctgacctggacgctcctgtgtggagaggaggcttgctcagtgagatccacgccagggggtaaattgggaactgatgggaaatgaggggctagagtcctgggtagtgcctgggaggaccttgctcaaggactgaattcttggtctgttcccaccttggttactctgacaacccctctctgtgtcccacggggataaagatctcctgagcagtggccattgggacagaggagaacctggtggccagagctaagcatccaggatcctggatttggggacaggcaagctcattgctgggggacagtgatagatacggcctccagggcctgggtgaagagagcaggagggctcaggacactggaggctgtgtggaggtcacacccacgatctgtaccacccatggatgctcctgcattgctcacctttgtgtggacatcagatggccccaacttttgcactcctgagacatctcatgcattcacagagggacccaggctggggctgtgcatggccttggtctctagggtagtgtgaggacagctgagcactcagctggctgggcaggactcctgcgaatcctgccctttcctgtgtagggtccaccccagcctgactcctaaccccctactcctgtctttccagggaagagagactggggttgagataaggtggagatatttttcctgtgtgacccaggagagaatggacatggagtttcaggtgagtttctgctaagttcccatgagcagaaaaagagccaatgagaggaagtttcccctttattcagatcctttccaggtgaccccgggtgggccataggcccattcactttccctgcaagcccccgcttcctgtggtgatgggaagccttcgccttggcccacccagagcccggggcagtctgttgaggtctctatatattcagcagggacccccatcccttcctgtccccaggcctgtgtctcctcaggactcagagctggttctctggctcaggctccatgtccttccccatccccagggctgggggcttcagggacgctccatcaacccacaggagcagctcccagaggaacctaagaagccacatctgctttgtggtcgatccagcagtaaatgtttgtgtcagagtgtagcaattccagtaaaaacagagaagaggtcttgacccctgaggccttctcagaacagggtctggcatctctctctgggcccacccagggctactctgggactgaacctggctgtgctcagggggttcctgctcccaggcccctccctcctctgctcaccacctcctgttattttcactgcagtttcctgaacttcagctcagccagatgccagtggggacagatcctgggtctccctggggcccaagggaccagaatatctgtggcccccactcacctcatagatgagagcagctgccctggtgctgggtaggggaatctgggcaggggagagaggggtgtcaggggacagggaaggattcctgctgtgtaggaattccagggctctcctcaggtgatggagggtcccagggtggggttagcacagggagtggatgatcctggccctgaacagaggcccagctcatggccagggcaggtctaaccttatccaagtcattctgggtagggtgggtttgtgctggggattgacagtccccctgccctgagcctgcacagctggggccccagtggaaatgggattgggaacggacagtcttacctaggagatggagctgtcagagggtccatggcctggggacagagacaaaagtgagcacgagagtgttaggatagctgggcccctcctgcaagagtgtgtgggggtcctcagttcttagagaattggggagagggagcctttctcaggttattttaggggtcaagtaagcaagtgaggttgaggaagtgacccatgacccagagcccggaggttagggctgacccggccagttggggtttcctgtgtgatgttttatgggatcctctttgcagccccagggatagggtcagaggcccctgggtgtaactggcaggagtggacaacttggggctggcttagtagttcccagccacacccagactgaagggacactcaccgggggtggaggctgggggctgctgctccctgaagtcactctgatcgctggccctaggaaaggtcagggttatttgtgaaggtgcaaggttaaaagtcacaaattggagttaaaataggggaccaggaaaggagcctatttccaagaggggtatggagacctcctttctttatggagttctgtggtaggaggggcccaggtgaggggagttgaggaaaggccttacaaagccacatctgtcctggccagaggggaaggactctcaggcagatgctgggccaggagaacattgatccagtgacacaggaaagggactgaggacccagggaaggaatcagaccaccaggggttgcctgagaggaagggtcaaggcaccagggggaaagcagggccaggcacatgtgcaggacactgaggggactgcatgcatcttggattctcctggaactcagtgtccctgctgtgaccagacactccactcagggctggagatgctgaaatgggacaatgatcttgtcttctgtctctgccctttggcaagagacataaacgacattccaggatatgccatattggggccccggttctcccttctcacagctcagtgtctgcagttaccatgtcagtcaaaggggtgctgaccccacccagcccgtccaggctgttccagtctccactatgtgataatgcccaggatcccccctcagatgccctctcactgggtggatggattcagtgaacagggggaggtaccaggtattgagcaccgctcccccctgctccaggcagctgtggctttgctgtgctaggaaactaggaccatgctcaggggcatggccttaattggactgaattcactgaggacaaagctgttgaggaagcagcccagggtcagcagctggtgaggaaggtgccatggaatgagagggaaggatccctggggagtcgggaggctggggagagcctggcactgaatacaagacagggtctccttccttctcgcctggggtcagcgtgaaggatgggagcagaatggggaaaagctgtggtacctgccagtttttcggaggagcaggaaacacacaagtgcagccaccagaagactcccaaccaggaccccgatcaggatgcctagagtgttgtcatctgctgaaagaagaaggcaaaggggatgaggtccaaatctgttccagggggaaccatgaggggccttgcagggcaggggcatggtcagggaggaaggaaatgccatggagcctgagtgtggtctgttgtgctgtcctcatagctggctcccttgctctccgtggttgcaccattttctgtgtcttaggcttgaattactgggatgcatcaactcctacattctcccacaggaagcctgcacctcatcctgctcctgtgttttttagtccctccttcctctcacatcactcctcttccccctgtttctttttttccatcccatggcagtcgtaaagggcaggcccttgctgccaactcaatgctgatgagcagggatgatgttcattgactgttttcaggggccttccacatggaaggcacagtgggaatcaatctacctgcagcttttctcaccctcccattgccttgagggagaagggtatgtgatattgtgaaatacgtatttggtgttcatcaccattgatatggttaggctctgtatccccacccaaatctcaccttgaattgtaataatccccatgtgttatgggagggaccttgtgggaggtaattgaatcatgagggtgggttttttccatcctgttcttgtgatagtgaataagtctcaggagatcagatggtttcataaagggaagcttccctacacatgtcctcttgcctgctgccatgtaagacatgcctttcaccttccatcatgattgtgagacctctccagccatgtggaattgtgaatcaattaaacctctttcttcatacattaccaagtctcaggtatgtcttcattagcagtgtgagaatggactaatacagtaaattggtaccagctagtggagtgctgctataaagatacctgaaaatgtggaagtgactttggaactgggtaacaggcagaggttggaacagtttggagggctcagaagaagacacaggaaaaaagtttgaaacttcctagagacttgttgaatggttttgattaaaacgctgatagtgatatggacaataaagtccaagctgaggtggtctcagacagagatgaggaacttcttgggaactggaacaaaggtgactcttgttatactctagaaaagagattggtggtattttgcccctgccctagagatctgcagaactttgaacttgagggaaatgatttagggcaactggtggaaaaaaaattctaagcagcaaagtgttcaagatgtgacttgggtactgttaaaaacactcagttttatgtatttacaaaggtatggtttggaattggaacttatgtttaaaagggaagcagagcataaaagtttggaaaatttgcagcctgatgatgcaatagaaaagaaaaatccattttctgaggagaaattcaagccagctgcagaaatgtgcataaacaatgaagagcaaaatgttaatccccaagacaatggcaaaaatgtctccagggcatgtcagagaccttcctggaagccccttccatcacaggactggaggcctaggaggaaaaaatgtttcctgggccaggcccagggctcccctgctgtgtgcggcctagagacttggtgccctgcatcccagccactccagccatggctaaagagggccaaggtacagctggggccatggcttcagagggtgcaagccccaaaccttggcagcttccatgtggtgttgagcctgcaggtgcacagaagtcaaggattgaggtttgggaaccttcgcctagatttcagaggatgtatgaaaatgcttggatgtccaggtgaaagtttgctgcagaagcagagccctcatggagaacctctgctagggaagtgttgaagggaaatgtggggttggaaccccgacacagagtccctactggggcactgcctaatggagctgtgagaagaagaccacaatcctccagaccccagaatggtagatccactaacagcttgcaccatgcacctagaaaagctgcagacactcaacgccagcctatgaaagcagccaggagtggggctgtaccctgcaaagccacaggggtggagcccaaggctatgggagttcagctcttgcatcagtgtgacctggatgtgagacatggatacaaaggagatcatttcagagcattaagatttggctgccctgctggattttgggcttgcatggggcctgtagcccctttgttttggccagtttctcccatttggaatgggtgtatttacccagtgcctgtacacccattatatctaggaagtaactaagcttgcttttgattttacaggcttataggtggaagggacttgccttgtctcagatgaaactttggacttggacttttgggttaatgctggaatgagttaagactttggggaactgttggaaggcatgattagttttgaaatgtgaggacatgagatttgggaggggtcgggtggaatgacatggtttggctcttcttcacccaaatatcaccttgaattttaataatccccacgtgttgggggaaggacccagtgggaggtaactgaatcatgggggtggattcttcccatgctgttctcatgatagtgaataagtctcacaagatctgatggttttagaaaggggagttcctctacacatgccctcttgcctgccgccatgtaagacatgccttttgccttctgccatgatttcaaggcctccccagctatgtggaactgtaagtcaattaaacctcatttttaaaaaaattacccagtctcaggtatgtctttatcagcagccaagaccagctcggtcgcggagatcctaacccagcagtgctagaggaattaaagacacacatagaaatatagaggtgtgaagtgggaaatcagggttctcacaggcttcagagctgagagccccaaacagagatttacccacatatttaataacagcaaaccagtcattagcattgtttctatagatattaaattaactaaaagtatcccttatgggaaaccaagggatgggccgaattaaaggaataggttgggctagttaactgcaacaggaacacgcccttaagatgcagattgctcatgctattgtttgtggcttaagaacgcctttaagcggttttccaccctgggtgggacaggtattccttgccctcattcctgtaaacccataaccttccagcttgggcattagggccattatgaacatgttacagtgctgcagagattttgtttatgaccagttttggggccagtttatggccagattttggggggcttgctcccaacagactaatacacccattttctggtatgtgactctaaagtccttagaatcttcaaagtgatgtctttttcaagctaataattgactgatgactggcagcccctaggcaacttcagaatgaggctggtcactgacccaggtaggattagagggttgggactttcagcctcacccctaatccctggggagggacctggagtttgaattaatcaccaatgaccaatgaatcaattaatggccaatgattgaatcaattaatggccaatgattaaatcaatcatatctatgtcatgaaccccaaaaggactgggtttgaagagctgaacccatggaagtttctggagtgtggtgcatctggggagggcatggaagctccacaccccttcccacatgccatgctctgtgcatctcttcatctgcatcctttgtaaagtcctttattacaaaccggtaagcctaagtatgtgtttccctgagtcctgagagctgtttgagcaaactaatccaacccaaacagggagtcatggaaacctcaatgtgaagccagtcataagaagctctggaggcccagacttgtgactggtgggaaggtggtggcaattttgtgggactgagccctctgctgatatgtccaggtagatagtgtcaggatggaattggaggacacctagctgatgtacggtgcagaactgattggctgctgggtgtgtgggagaaacccccccgcatcacatttggtcacagaagtgtgtctgtgttgatgattgttattgtggagtgagagcagaggaaaaacacagtttgagtttttccaaacagggtggaatcccatctgccaatttagaatctgaaacttatagtttcagtacttcaattaagattgaagtacttcaattcagtacttcaattaagattcagtacttcaattaagattcagtacttcaattaagattacagaactggtaagtgaaagtgatacaacaaaaatgtaaccaaagtctgctcaacttaacagctaataacaacaaagttcataaaaataataccagtcgatattgatagcactgattgagccctggctctgtgcatgaccttgttaagggctttaatcgcattaatctctgaataaatatcctcacaaccaccctgagatccaggtgtttgtaacaattctacagatgaggaaactgaggcccaggaggttgagtgtcttgcccaaggtcaaatacctggtacctattgtaaccaggatgataactggatgagtctaatccctgagttcttacccacattgctccccaggctctgaaggaatctcatccttctcattccgtgtatcattttacaccccccctccctcctaggaaaatatacaaggaaaggagtgagaggggccgagggtcactcacattttacagtcagcttgagggggtcgctcctgttggagctgactgggttggagacctcacactgatactccccagcgtcctcctgcctgatggggtctatggtgagcatatggttaaaccaggacagcttcatcctcttcgtgacctgcagacgctggttgttgaaaatccactggaaagaggttccagtgttatttgtgtggcaggtcaggaccacggagcccttctctgtgactgtggtgctgctggcttggatggagggctgagccactgactctgtggatagagtgaccaacagaaagtgtcttggggccatgctgcatcctcagagatctcagagtcaaatttagaacattctcctgtgaataaaggagaaagatgaaggacagggaggagcagagagaaccagagacacccatagcagcgagcagtagggactacagtgacctcagagaccccagggaccaggaggacccagctgcctcagaccaggaccagggagccctgaaaaccctcccacagatgagcggccccagagtcacatgagatgcaatacctggggtggctttaggagcaggcagtcagagaaatggaacatgggtctcagcccctaagggacaaggaagaggtgtggccagctcctcctaggatcctacatccaggacccagtctgtaaagaggttatgattattcctttcttttttcattaattccctccctccttcatcagagaactactgagtgtgtgtctcagttgggccttgtgcaggtacagggtgtagtgggaagagaaagctgagtcctttccttcatcctcccatgggagtgacatcaacaaatcaagaaattcatgatttcacgtccagtgagggaagaaatgtggatctgatgggagaggcttggacaatcctggcattgagtctgatagttgagacaggtgatttcgttctaagtaaaaactgactaattctccatttgcccgtcattcctcagaccagaatctccctctctgagctgaggatgcccaagaagaaaggagctgaaccaacatctggtcctggggtccacagatgccccacggtggtggccacgaccagattctgggctgcagacacacggtggtgtgacgttgagcactgacagcctgtgtgatgctgatgcaatttctctttaataaaatggggtaaatgtcaatggtccctggcttgccatcctctctgtaaattaacattaaaatatttacaattacctgacctaaagcttggcacagaatagctccaaataaacatcatctattattattttactccaaaaaaaaaaaaaaaagagttctctgggcctgattcctggtggagaaggagcggtccagagtgtcttttctctgctttccctcctcctgaggacagtgcacttcccgggacatcttttaagtttcccatccagtttaatggcctgggaagtttgtttgtctgtcctctccactctgactctcaggtgaaagatgaggctctgcccttgcccagatggggctctgggggctgagccctgcctggtgaccagctctaggaaccacggccctgggacagctggtaaatcgttgctcacaatcagccctgcccaggaagccacaacccagccctggcacaggctccccagggtcatctggagtcaggatcttgggacaggggcctggggcaggggcttgaagggctgagcttctctcagaggatcctcaggccaggccctgactgagtcctataagatctttctcaggtcatgtctatgaggaggaggccaagcggggttggactgagactgattttcccccgctgcatctcccgcatcagactatccttcttgctgtagggaatttccacggagtccggataagggaaaggaattctgatctgttatagtttgtctcccctgggtgtgtcctgcactaaatgcccaaaccccaacatgggacgtaatgcagagggggatgcaggcacagcccaggcctgacaatcctgcgtatgtgaagcagaactgacccccaacacccagaggcacggaggaatcactcaccgtatacacggagatggtgagatgcctgttcaatctgagaatttctgtatgtgacttgtagggtgtagtatcccgtgtcctctagggtgacgttctggaaatgcagatctccactgggtgatattgtctctcgaccgctgtatgcaggccctggagtcctaacgtgagtgtctattacatatgctgcgattagctggttgggctccaccgttttccctttgtaccagccatagctgtaaagattctcgggcagataaaccacagagagatgaacattctccccttcagcaacttcaaagggcgctgatgcaataaagagccaggcagtggtgggtgcgttccagaaagttaaaagtgaggctaggaaagggagagaatatcagtcaatatttgacctatgcattggcatggaaagacggggtcctgggtgcaggtctcttcacccctcagccttagagggtgtgtgtgtgtgtgtgtgtcctactgggtcaaagtcagcagcatgaccctcattccttcagtacctctgaccttggcatttccttgtgtgaaccctctttcccaggggtctgcatggttccctccccactgccttcagttcctactcacacaagggaatccctgggagacttctttcgtgaagcctcctctagagaccctgggtcttccctttctgacctttcccagctctgttccctccagggctcttgtcagcacctgacctcacattctagatctctttgggtgtctgtcttcccccccatgagattgtgagctctgtgagggcatggacttgagtgatgttagttgcaccccagtgcctgggacaggctgcagactcctgtggatgagttcatgagcgttcccagggccttccatatcctggggtttatttgctaatgtctgaggttggcagatgaagacagagtttcatgccctggtggtgtttttatttaaattgtcactgtgatatagttttactatcattttcaaaatgtagtggccactgacaatgaacttgaaaacatggaccaactgagattgttttgccccttggcaattccagttcacttagattttttggttctccttagacgctctctcccctgagtctctaacaaaagccctctgtctcctctcagagccccatcctccccaggagaccccagccagtctctgtgctccctcctcccacccactcccagggagtcctcccctcacctgtgagcaagagcccctgccaggggatgcattctctgtggggacaagctgaggggggccccatggtctctgctgcctgctctgtcctcctctgtggagaggagcttgggctccaggaacgctctagacagggttactgtgactgttgtctctgctgtccttccttcctctatgctgagcttcctctcaggcaggagcacttcccgtttatgggcaagggcggggctctgcctacaatgtctctctgtcccctcccctctcagtcctgcctcccttgtccctcctttctccttcctttttgcctatatttggttccctaggcaaaactttgagaagcaacgctgatggggtcctcataacaggacgacccactctccccagtactgacctctgctgtgttctggccttggttctgtcacagccggtagattatttccctttgtgacacacaaaaccagctgggccctgggtctcctcatgctctccagtgctccaggaaggcagaatgatgcccagcaggaaagtgacagaggtggctctgggggctagaaaggggctcactgggtgatggctgggaaggacccacccgctatcttcagtgtcaccagcctggcctctgacccagggacagagacccaggcctggaggtctcgggaggatccccagctcctaggtgtggagggaggtgtcctgtgtgtcctgggaagagaggactttgatggaaggaggtgggaggctctgggttctgctgtccttggtgaaggtttcagggggaccctctccatgtctggggtctgtgcccccagcttaactctcattctctttgcaaatacatatattttgtggatctgcagttgcctgaactgtctcatgtccctaaatctttgtatccctttttacagaaggtcaggaagggtgtgtacatgagtatgaggactatctgatcagggcgagtgtttgtttcccaaagatctctttagatatggtataatacataagataaatgtactgaattagcaattttaagtgtagaattaaatgatactaattctattcacaatgttgtacaaccatcaccataattttttaccagaaaatcttcattataccaaatggaaacttcatacttttaatcaataactccccacttccccctgccccacccactggtagcctctgatactatcaatctctgtgaatttgcctagtttacatgtctcatataataaggaattatatacgtgtattatttttttctggattatttctcttagggtaacacttttaagattcatccacgtcgtagcatatattacagcttctttcctatttatggctgagtaatatcccaatatatgtttatacctcaattttaattcattcatctcttaatggacatgtgggtggtttccacatttttgctattgtgaaaaccgctgcaatgaacttacacttggaagtatctgtttgggtttctgtgttcatttctttgggggtacatataggagtataaatatggggtcatgtggtagttctatgtttaagtttttgagaaacagccaaactgttttccagtttgctgtgctattttatattcccatcagcaatatacgagggttccattttctctacattcttgtaaacacttactatttaatattttttaaaacttatagccattctagtaggtgtgaagtgatagctcattgcagttttgattttcatttccctggtggctgatgaagttgagcattttttcatgtatttactgacaattttaatattttttagagaactatttattcaaatcatttgctgtttaaaaaaaatgggttatctttttattattcagttgtaatagttctttatatattttagatacaagtcccttatggggtacatgatttgcaaaatttttctcatattctgtgtcttctcactttcttcatggtgttctttgaagcacaaacatttttaactttgatgaagttcacttatctatttttaattttgttacttatgctcttgatgtcatattgaagaaaccattgcccaatccaagatcattaagttttactcctatatgttcttctaatggtttgataagttttgctattccatttaggtttttgaaacattttgagttaacttttgtatgggctgtgaggtaggggtctaactacactatctcgcatgtggttatccagttgttccagcacaatatgaagaggctaccattctttccccattgaggaatcttggcacccatgtcaaaaaccaatgggctgtaatggtgagggtttatttctggactcttgattctattccattgatctctatgtgcattcttgtgccagaagcacactgttttaatgattgtagtgttttagtaagttttcaaattaggaagtgagtcctccaatttttttttccagattgttttggccattctggggtgacttttaaaaaagatgtagttcaatggttctcaaagcaggagtggttcagctctccttttttggcagtctggagacctttttaggaccttaatctaagtagataaattattcccactttcttttctgagttgctatgttacagtgtatattgacacccatgaaataattgagagaccctggaagtgcttgcctacatagtgagggacaattagttccatgatcatgggcacagaagattttgttttgggaaacaattttgttggtggagttatattcatgcttactcttttatttgtcttcatagcctgcatctccttcagacttcatatctgtttattttcttgtttgtcctctggggtttgggtgttgggtgaccagtcagctggagctggaggaggtgcttagcaaggcagtgaccctggttgggaggagcagggctcagcagggtgaaagtagctgggccttgagtcaggagtggcatctggaaggcctgactgtaagggtcagaagggccagcaggtgggtgtcctaggcacaaacggtggctgctgctgtggactggaggaaggtaagaggccccgagtattccatgttcttactggctccccaactgaggattcctctcctgggctggtgctgtcctgcagcagggaggggttagacagggacggctgcacatcaggccggagtccatgtcatcctcttaggcactgtcactacagattgaggattctgttcataagccaagcctttgcacaaggaagggacccgggctctcaaggaagagcagctcctggtcagacctccatctccttctctctcattgcctgaggcctcaagcttggtctacctggcacaggggtctggatcctcctcccagggttggggtcttactgagctgggcacctgcaggtgggagaagatctggaggggccccatctgccttcaccagattgatgttgagggtccctgagtcctgcaccactatcaggtgctgagcaacttccagtgtcagtgacaaccaccccatggtggaagcagaaccacctcgtgagaaagcacctccaagcctcagtgcttgccatgtgtgggaatttgctggtttcagttgggggcatgttggtgggtggtcatgaattcagggccggattctatgctcacagtgcacatgctggatgtggtacagaccccaggcagggctcagtggggtggttttgggtgtgcacaggtatcttttctggaggagctggtggtgatttggctcccagaagttcctgagctctgcagactcaccaagcactcaatatttgagtgaacattgggcgagagagcagaaggtaagtgtcagggcatcggggttggtgcctctgggaagaggaggaacattctgggaacaaagctctcccccggcttacagggagcttcccatcgctcctgccttgaggatcagggaaactagggcctctgctcttccaggggctgcttgcaggcagtttgctctgggagggggtgacccaggagttgcctctcattttgcatttgagatttaaaaggagaagggacagtatatcttgccaggtcacaaaaattacaggcatcatattgactgaagggcactcctgtcatcactgcaatataccagaatggtcttttaaaaaaataagtgatttaggtttaccagcaactgtaatgcttgttttattcttctagttcaccgttaatgtcacttttgtagttttagcactggcaatgttgattttatgttgactctgatgattttaagctttcatttgttcacatagagatcatcttctttctgaatattaatgcattttttctctatttctactggttattcctgtacatagagtagagaatcacttttcccaaggaggtggaaagcttctgactaccaaaaaaaaaaaaaagtgtcaaaatgctttaaagtcagtaacttaaagatcaaatccaagagtgggcaacagattctgcccagggtctgaaaggtggagaggtgactggtgaggatgtttaaaagacctctcctctctactccctaaatgggggccatccagtgttcttgaggttcagagaaggcccagggctggggcagcagggcactgtcagctcccagctcccaggggccaggagtaagaccccaacactgtccagacactgattgcattcattttgggggagagtagattcttatttaaagaataatacaaaagtctacaaatatgaacataaacagaaattcctttgctacaattttccccttaataagacattccttcctaatgacatatgtgactgcattcatggctgagatgttttctaggatggtgagagcatcagagtggactatctggtgccttggggtcatgcattttcttcttccaatgtctacaggatcccccatgtcccactttgtagtgtaactcagtgtgtgtcattctggtttttgttgtatagatccttggaaagcccatgtcattcctgctgtgaggtacaggcagccaaatggcatcatctctaaacatgccttctcctggtacatcaaattatggaataaatgaaagccattttgacagatattgaagatataagtttctactcttcccacacatgcttctcccaagtgaaggattttactggtgaattgttattagagattagtgtggatcagtgactctgccaggggaaattttgccctctaggggacatttggcaaagtctggaaacattgttggttgtcagagctgggggagggagtcctgctggcattgagtgggtggatggtgctgaacaccctgcagttcacagagccccaccagtttgaccacccaaatgtcaatgctgaggagtggagagccctgctgtgccctcccgcagcttccctgaagcttcccctcacctgctcctcccatgtctccccaccacttccccacttcacccgcctccttacacctcagtcccctccacctgaactcaccccttagtccaaggccagccctgatctccgctctcctggtctccttgctccttagcaggaggcgcccactagatggcgcccttgcccttactggagctcaccgtctccctttccaccctgagacaaatgtggctgcttttactgccacaaccccagccctccacactctagatttgctcagggagcagctcctggacagacctcagggaccccagggaggagcctcactctggagattttgatggcatggtctttgaacttcactgttacccccagtcaggatccaggatgttgggagtgcatgattctgcccggtcccacttcagcaggaccccactgctgagttgtctgtggggacccgggcctctcatctccttcttgcattgcaggagagggatcttagcactgctttcacataaagtcagataatggaggagtgcaggtgagtttgggaaggtggacatgaagagaggttgtgtccctagaggtggcagcagtgagaggatgggcaggtgggaggaacacagcccatccagggttgccagccatattaggagcgacagcctttcctctaagcctccagcctttttcctgaaacattccagaactttccacttcagcacttcccactgaggctcctcaggtctgtccctgagctcccagctgagcctacctacccatctgaaatcctgagtcctgtgtcaccctcgttccccattattctgtgcagttctgtgggacgcccagctctcctgacacccccagtcttcagaatggccatcagcgctgtcgctgtggcaccagggtgactgccgcctggaggctgagtcctggcttcctgacagctgtggggcccgctctaggctcccttgtcctgatcattcatcacctccaggatgcacagcagctgggccagggggaggagcagggacaggtgtcagccaccctgtgtgtctgcaagtcaggctgggggtgtgggaggacgccaggaatgactgaactttctgatttagagggtgagagcttgcactgatggaatttgggatttaataggaaaagcatagcgttttcctattttgtaggcagggtggctggagtttggaatcatagattcccctgggatgtcactgtggacctcagtcccacccgttaggggcacagatttcagaatccacaccctggggcaaagcaggcatgggaggctccatcagcctggccagggctctctatttgtgcagctgctgcaaggagatgtgcactctgatgggaacagtgctccctcctccttggggggcagtatctagctccctgcagcccctctccctgcaggccctgccctctctgaacctcaccttccccaacccgccccccgcaatcccatctcagctgtaatcccaacactttctcatccattatgggtggactgcttgagcccaggggttcaagactatgctggctggacaatatagcgagttgttgtctctacaaaaagacaaaaattagctgtgcatggtggcatacacctgtagtcccagtcactcaggaggctgaggtgggaggattgcttgagctggggaggctgagttggcagtgagttgagattgtgccactgtatacttcagtgtaggtaacagagcgagaccctgtctcaaaaaataaaagtaaaaaaaaaaaaagaaatatggaatacattattgttaactctaatcaaccatgctatgcaatagtccaccagtaataccagtaatagccaataatgaattatctgaaaaagaatacaatttattcttagctatctactgctaaaatttttaagctatcttttatgatagctgaaacaaaagaagtaaatttaaccaaggaagtaaaagacctttataatgaaaactgtaaaacattgatgaaataaattgaaaaagacacacgcacaaatagaagatattccatgttcatgaattggaagaactgatattgctaaaatgtccttaccacccaaagtggtctacagattcaatgcaatttctgtcaaaacaccaatgatattcttcgaagaagtagaagatcctaaaattagaaaccacaaaaattcctaaaacctgcacaaaacaccctgagttgccaaagcaatcttaaacaaatagaacaaagctagtggcattacacttcctgacaatcaaagcatactgcaaagctatagtaaccaaatcagcatggtcctggcataaaaacaagcacatagatcaatgaaacagaataaaaatcccagaaataaacccatgcatctctagctaactgattttcagccaaggagccacatgcacacaatggggaaaggacagcctcttcaataagtggtgctggggaattggatattcatatgcagaagaatgaacctagaccctatccctcaccatgcacaaaaaattaactcaaaatgtattaaataaagacttaaatgtaagaactgaaactatgaaactactagaagaaaatatagggggaaaatccatgacattggtctaggcaaagagtttttggataaaatctcaacagcataagcaacaaaaccaaatataaacaaacgggatttcatcaaactaaaaagcttttatacagcaaagaaaaaaaaggccagcagagcaaagagacaacctacaaatgggaggagaatatatttgtaaatatatacatatatatttgtaaatatatacatctgataagaagataatatccaaaatatataagaaaattatgtttctgtatagttttatctgactgggatacagaggccacatccacagtcccatcctcaaaggccacttgttcccaaaatgtcaagcacatccctcaatgatccatcatcaacacctatgtctgtaggatgaagggtgaatcatgaagcactaaaaaggaagaaggaagccaatcccaaaacaaaatgatgcagggtctggaaagtccaaagcattttttttttttttttactgcatcttcctcctttcttctccacattcccaatcctcactattgattaacaaaacaaaaaaaactgggacccaccatcttccctactgtcaggagatctagcgagattgtttgagtcttagaccaaactttgccataagccaaatttctggctgactttacaatgatatgagctagcacagtctctttttctgccagtcaacttgtgctcggttttatttgcaaccaaatagaggtggtaaccaaatataggtgaccctaaaattagtcatcaggatgaaatcctaaaatgtgcaacaaactgggttgaattcaggattagtagcaacatctctgttgtgggcttgaaaagggggcacccttttatgcagtagcaaaattgctaaattgttgtttgctgagtctttggactctcatcccggattttctatgaccattcaaacagggctgcaatgaacatctatggttgtttagcttggcacacttctacatttctatatagtaatatctagaagtgcatttgctcaatcacaagatatgcacattttataattgactgctatcgaactaccttaaatagccttaatttgttctcaacattgtttaacagggtctgtttaatgtcctacgtccagcaaggacagtatcacttttcttaatatttttcaaattattggaccttaacaaatacttaatgtgcaattaattgattcctttgtattcccatgccttcttttatatgtttccttatagtacacaaaaccacattattgtttctttacttgtgtcattccaccctggaccattcctatctaaactataacattatgagagagagagagagagaaaacaatatgaaaatataaattgattaatcaaaaaaatttaaataggacaaatcaggaagacacaagagagattttaaaattattcagagaataccacaatagctgtaccaatatattttaaaacttagatgaaacggacaactatctcgataaatgtaaattaccaaaactgactcatgaaaaaatggatattatgaatagagcaataatcagtaaagcaattaaaaagacagttgataatttttatttactgacaacaataacaaaatttcaggtcctgatatttttatggtgaattttaacaaattttcaagctcctcctcaaccaattctcagaaggtttaaaactttaacaagaaaacactttctaacacattttcagaagctgttatagcatgataccaaaaccacacaagaaaattatagaccaatctcacttacaaatatacatgcaaaatcaaacaaaatcttagtgaaccaaattcagaattaataatagcaaacaagcaaaatatgttatcatacgtatggcttatatcaggaatgcaagtatgtttcaacatcagaaaatacttctccacattaacagactaaaggagaaaaacgcttgtttaattatctcaataggtttttagagaattttgaaaattttataaagttatgcgtattctgtaaaattgatgaaatccaaccttgatttatttttaaaaattgcctttcctatagaattataggtaaaggaaacacatgcatcctcacagagctacttcaaggctaagttacttcccataagtaacgtatcctgtaatgtgtgcttggcacatattcaatactaaacaaatatttgcaaatcctcaaaccacttctcgctcaaataacccacctttgtcttttgcctttatgttagggttgattttctcaattgtatcttggagatcctttggtgggtctttcagcaattaccctgaatttgcttttctgtttacaattttaattcctgggaactctttcttgttctctgactgcacccttttcatgagagttcagccatcaatcctccagaaccccaccccccccgcccccccaaaaagcaataaagatgtctaaaagcttccttctgggctttcgaatgatgtttaccccaggcatttgttctattcgttcatcacccattttccctacaacttgcctacacttgatatcagatttttatttattagtcacctatcttcttcattggcccattttcctattttgccactggttgttctcaaatgtgttatgattcctggttgtacagtcaagtggttgataatcttggatatacgataaagatttgctctgtagctgtgtgtaagcctatataaaagcttttgtatttttcttcttaaaaaagacaaaagatggttgggaagatccctccagttcaccagttcgaggctgcagtgagctatgatagcgccgctgctctagcctgtctgtctgtgaaaaacaaggggggcggggggcgggggggaagactggagatgtaaatctcccgcagggccctacccgtatccgcaacaggtctctaacaggaacagcctcaggcctgtgttggaacaaggtaggttacagaaatctggaagccagatctgtaacttcagggtaaggactggctctcagggctgatcccccgggctgggtgtcccagaggcacccgcccccgccccttccccaaggcaggccaggacaccttcactcctctccttaggctccccacccccttctcctccccactgtgcctcctggagtagcggtggcggtgccacaggggagcggggcggggcgggctctgagggcaagggggatgggccccgccggggtcactggcggccaccctggaaactcgacgcaggccggcccttctagtgaatcgtcccagccacagctggcctcccagccgcgcttggggcgcctcggggcgcgaatggtgcaggttggggagactcaccacgcaccgtcgggggtcggtccggttattcctcaccgctcggctccagtgggcgcgcgggcctctcctcctcagttcctgcgctgcagtccctccctcacccttcgcagcttgggaatccaactgtgtcattccgacggagcgccgtgaggacctccgagggtgttagcgccaagtgatctctgtccagcgctctgaatatccaagtaaaggagttcaatgaagggcgggtcaacggaggagaaaccgtgactctctcaagggagcccaaggcctccttgtctaattagtgacgcgccaatggatggaggctcttcccaccatctcttcccagcatccagtgacaccaccgccaagggacgggctcggcggaacctgcaggaaagaagcatcggctgagcctgactgcagcgctgtgaagagacaggggaggggatcagtagttggtcccgcgcccaccccctgtttccgcgaggggcggagttgactggccatgcaggcagagggcgaaatgtgaaattccactactcctaccgtttttccctgacccgatggggcggagtgtcgtcaggctaagttccctggcggtaaggtggggagattgaggcgcacacctgccgaacggtaacgcaggattagctaaggcgagctcaggacagaagcctcccgaggagcaggagggcaaaataataaataaataaataaataataaataactcactccttggtctttatttgcggcaggaattcagaaggtgaaagcggggccttaggatctttctgaccttttgggttttaagcaggaggtgtcagaaatgttaccacagggctagctggcttgtggccagcaagcgttcacaatgccctcgatttttcatccctctctgtgggttctttttttcattgtaaggcagaatttctacgattgctcacccactcagagaacctgagctggtttagaccaggtgagacaggctaggtttaccctggtgatgatgtgttgttgccatggcgatcctgcccagtaccagaggccctgcagattcagatgcttggtgcctgtgcttggctgaggggccaatgggtgaagctgccatctgcgggatgatgactgaagcctctaagtcagaatccgcccaggctgagccttagggcagctccatggagcctcggctggcctgggatagagagtccaccactgtgccagcccccagccactgcctaggtcctgtgctgagagccccttgtccagggaaatggcgtccagtggaaaagggaccacccccttgcccttcactcaaggcaggttggtgacaaccctgaagctaatccgttcctagaggagctgcttctgggtccgagttttctctgcagcagagcagctccctggatgggatctgttcaaagtccgcctttcacgcggaattttccgtccttgcaattttccacctccaccactaggggatcctctctgaccgcctcatgccggctctggcctctgagcaggggtttctcttctgcatgtgcgaccttgcgcatgcctagtggccttttgggacctagagctgctccacaccccgatggggttacagagtgcctcgcctccactccaccccaccagggttccttccctggctgggatgggatttcagaagcgccgaggaacagcccagacaggtgtgggagagtagccaaggcccctgtcccggggtggccaggacagcggtggcctcgcataggacctggctgggctgctgcaatcagtgtcctgccccttggagagcaacagtgaaaacaacaagactatcttcacccaccttaagaaagaacagaaccagtatccccaactctgctgtgtatcccaacccaattccattccccaccccactctcagtagccaatatgcaaaatattagaatactcttactgttattattttcaaccacactctgcatcctgaaaaaccatatatttcgttatgtgcttttaaacttcttgaaaatgaaatactgaggctgggcgcagtggctgacacctgtaatcccagcacttcgggaggcggaggcaggcggatcacgaggtcaggagatcgagaccatcctggctaacacagtgaaaccccatctctactaaaaatacaaaaaattagccgggcgtggtggcgggcgcctgtagtcccagctacttgggaggctgaggcaggagaacggcgtgaacccgggaggtggagcttgcactgagccgagatcgcgccactgcactccagcctgggcgacagcgccagactctgtctccaaaaaaaaaaagaaaaaagaaatactgaattttcaaatacttgctttttttttcggtcaaaattatgttctcaaatttcactcctgtagatgtgcgtggctggctgtagtttttgcatttttattattaggtattctcctgttgcattaatatgccacattttatttctctcatgtttttggtgaccacttggggtgttttttggttttgtatttttgctgtatacatgctgccatggtggacatacctctttatacatatttcctgttgtatgcagacacaattttaggatgtgacatcttcagcttttctattgtgtcgtgtgtcttttccttcgtgctttgtgttatttacatattctggacacagattctttgtcaactgtatgtgctgcacatctctttcccagtttgtgtcttcttcttcttttttttttcttaaaaaaaactttctttatagtgttttttttttctttctttctttgttttgttttgtttttttgagatggagtcttgctctgtcacctaggctgaagtgcactggccgatctcggctcactgcaacctccgtctcctgggttcaagtgattctcctgcctcagcttcccaagtagctgggattacaggtgcctgtcaccacacccagctaatttttgtatttttagtacagatggggtttcaccatgtttgtcaggctggtctcgaactcctgacctcaggtgatccaccctctttggcctcccaaagtgttgggattacaggcgtgagccacagcacctggcctgtgttctttcttaagtagatgttacttttaatataatagaatgtatcatattttgcttttatattagtactttttctatctaattcaaacacatccccaagggtctttgtgtgtagactgaccaatttctcaagaatcatgaatgaatactgcttctctttccccaatttatctgtaatgctacctttattataaagtttctatgcatgtgtagaaatagttcctgatttttcactctgtgccaccagcataccaatagcacgctgtcttaaatattaaatagcagagctttatgagacaacttgatgtgcagtaggcaattgcccccttgttactcttcttcagggttctttgttgtaccacatgaattttagaattggcttgtccagctaaaagacaactgcaaggattttatttggaagttcataattctatacataatttggggaaagtattttcataataccaagtcttcctattaatgaacacagactctctctctctctcccccacccccacctgtttagttatttatatctttatggtctgttagttattgtttattgtctttcaaccaggtttcatgtttttctacatagaggccttgcatgtgaaagtctttcttcctagcttgctattacaaattttttttaattgcactttttgggtacagtggcttgtactgtaatccccgatacctgggaggctgaggcagatggattgcttgagtccagaagttcaagaccagcctgggcaacataatgaggtccctgtctcaaaaagtttgttttaaaaattgcatttgctgttattcaacaaatgtcattgtgtctcatatatggatttttatatctgataaccttgttcaacaatcttttgattctaacaatatatcagattcttttgagttttccatatagacaataatgtcatctgtaaattataattgtttcttctttgttatttcttggaccttttattttatatttttgtcttgctgcaaggcaatatccctctatatattgtggggtcttttttctcataaagtggggatggtgaacacccttgtcttgctctctgattgtataaagcatgctttctgtagcattttgtagacgctcttttttagattgaggtaattcacttttatttctggtttactgagtttttagcataaattcaggctgaatttgagctaaagctttttctggagacatcatttgaaaaattcatatgatttactttctttaagtcaccaaagttatgatttacattgaactgagtttctactgtttaactgtattcttgggagaaaacccacttgtcactgaacaatatctgttttatttactgctgtcttgtgtctaaattttcttttaggattttttgtatatgctcagattagcctgttattctcctttctgtatttttttctggtttgggggtcaaagttataatagcctcacaataagagctaagaaaccagccctaatggaggccggggcaggaggtttggagttcaagaccagtctgggcaaaatagtgagacccccatctctatgaaaaatagaaattagccaggcatggcagtgagtacctgtagtcctaggtacttgggagggtgaggcaggaggattgcttgagcctaggaatttgaggctgcagcgaactatgattgtgccactgtactccagcctggatgacagagcgagaccctgtctcaaaagaaaaaaaaagaagaaataaaaaggaaaagataaaagagctaagcatctgtttccttttttccattttctgggagagtatgtgtaagactgtaattaactgtttcttgaataatgggagaactctgtaaaataatctggctttggtgttacctgtattggaaggatgaaaaataccaattcagtttcattattggttgatagggctactcatgctttttgttttgttttgttttgttttgtttttgagaggaagtctctctgtattgccctgttgtccaggctgagatgcaacgttgttcacaggcctgatcctggctcactacagcttctaacttccgatctcaatagatcctcccgcctcagccttcccagtagctaggactacaagcatgcagcatcacatccagcctcttttcctgcctgacccagttctggtttcctttagttttctaggtgttcatccattttatctaatgtttaatgcatttggcataagggtgctcagtgtcctttcattgtctgttgtctgtaactgttgccattttcattcctatttatgagtactggcgtcttctctcactttttcttaataatcctgctggaactttgctttttaaagaacatcttttgacttgttgattcttttttcatacatattaactattttcttattttttgcctttatatttatttcttttcctgtttgaaacattgctcttttcttactataaaaatgggtaagtagctcatgaattaccacctcttttaaaaatcttttctactgtaagcattttagcagtttacatttgcccacaagtaccacttcagctacaccctatgtgcttttacataaagtcttcatttttggtaagacatattctcaaattttaattatcacttgtttttaaatccatgatgttttatttgaaatgttgtttctaaagatacattttctggttatacttttattcttctaatttagcacagtggccacaaaacatggtctgtgcagtgcatacaatcgatgagtaatttctgagctgtagtatttggcataatatatggcaaaatttcctaagttttccatgtgtgctttaaaaaacttccagtaaaatacataaatctgttagatcaagcttctcacattgttcaaatagtctatatgtttactgattcatttgactgcttgatttatcaattacaggtaggaatgtattcaaatctcctattaaagtgtgacactcaagtggctttttaaagacagagatgccaaaccaatgaatacatgattttccccaaagcctgcacaaattctctaatgaaattttaccatgaaagtttgtttaattaaggcttactaaagcagtatgttgtcttttactttttaaacagagaatatatattttaatacatcgtttaagtttatgattaattatctattactgaggataagaatctttgcctgtgctcattcagcatttgcacttcatttatgatctgccttctcatagcttctgttaatttttatactagagacatttatttgtttgtataaatgttgaaggtttttttttgttgttgttgtttttgagtcagagcctcgctctgtcacccaggctggagtgcagtggcatgatctcggctcactgcagcctccatctcctgggttaaagtgattctcctgcctcagcctccagagtagctgggactacaggcatgtgccaccaagcaaggctaatattttgtatttttagtagagatggggtttcgtcctgttagccagggtggtctcgatctcctgacctcatgatctacctgcctcggcctcccaaagtgctaggattacaggtgtgagccaccgtgcccagctgggttttttatattataaggagatgtaatagatagatagatgtttcaaagatagtcaaatgtttttaaaatttaaaacacttttttacaggttgactttcaccatttaatttcatctatgtgttttgccttagagaaattttaaatgctatgtagatctcatgacttataattatgaagcattttgttttctgttttccacgaaacttagcttaactttgagcatataatagttgtaaaggtaggagagtaacactgaaaaaaggaattgcataaaaatggcacattttctgtagagttgtttatcgcctgaaaataggccccatttcatggaagtaagatgatcaggctcaggtccccagacgaaactcttggcatggtttttggagatagtccagggctcagtactggctctatcatttgctacttctcccaaagtaaccaatatctcatccaccctgagcccatttccatatctctaacatgaggataatagcatctaccttacacaccaagtagagggatcaaatgtaggaactaaatcaaagtaccagcactgaataacctacatcctcccacttcccaaaaggaagagagatgtatcccctgttgacaaacgagaccattttgcaggagagaaaggaaatgccagttcacttgcaatgtaaacatgctctctctttttagggatgtccagggacctgagagagaacccatgcttaccaaagagtttctagttccagacacacaggactcgaagggtgacaagtatggttttcagggtccctgaatccacccagtcctcacagaaactcctaaaagctgtcgattgacagcgttgagttcacagctctggtcctcacatgctgatactgcttgtgatatcgaacccgacaggaccccacatcacaattgatttaccaactacaatataatacctcctgaatctccaaattggctcacccaggaacaaaggcttggggtaaaactggattaggagatataagctctgaattttctgagggtgagacacacaaggattctaagtgacacgccacagagtaacgggtctgtgactggaggacccacagatttgtcttactggagacaccacatgcacacaaactccatccttagctgtggaaacaagggtcttttgctatcttagccgaattctgggagtaatttttggaggggaggagatctttgggattgcctctttcaggccctttacaaaaatacctacttcttaaatggtaaagcttacactaaactgaaaaaattacatccttggctttttatgaagtaggtgttggattgaatcactactggaagaagtatggcatcgcaaattctaagcagtggtcaaaggatggatctgttaaattagaaaaatctctaaatttataaaaagattttagattcctttattctaaacaattgacctatttgtactcatgggacaatcaaatttcaaaggagatatgtaacgatttcatggcttgcattaaaaatccttctgataaaattaaagataaaaaatctgaccccctgccaaaaaaatcttttgaagttcatactgcctgctttcaatattctgtgggattcacaatgaaaggtgccttatattgtggcctagcttcaagtttatgccttcgccaccatggcctgggttcaattcccagtcagggccccagcgcctttggtttaatgtttgcgtggcatttgacttttttacctatttagtattggtgagattacctttggtaaaaaaaagtttaaagagtggaaatcgcaattctttgtgttggctaaaatctgattataagagatctggaaggttttatttttctttttcaaagagctctatggtcagaagtcggcttcatgaaaagctaatatttaattatatgtacatacagtctttctggattttctcttttgcctcctgttttgaaaaatatttggatttgagtgaaactccgttttagaaattaattgcttggtacaatatacccatgtaactaccctgcacatgtaccccctgaatctataataagagttgaaattttgacaaaataaaattagattttgaattaaaacaaataggtgcttggttcctctgctcacttctttttaaaaggaattcctctcccatgtacttcttcttttcccttctttaccttccttttggcatctttggtatcacatgaagggatctagagggaattttaagtgactctgaaattccttgagaaatacacaaaaagatcccactcaccccttttgggggtctcctgttctccttgtggagtccagagtcagggacaggctcctccaggtctgcagctctgctctcttttatttcatcttggctgattgctttggttttgtgagtaccaggcattactttgtactgtgagagacacgtcctttgtgagtgcaacggctgctgggtcactggtgagggctgcagtttggagatggctgagagccgttgcaataaatggttgtgattgcagggggctccttgtttctttgcaagtttagatgagaaaggtgcagtttggacacagtttaaaggctgtgaaaacaccaccaatgaatatgatttcctttggggatggtctgattaaaagtgggctgattgttgctgtgctactagccttgaagacatgtttctacagcattgtgcagtgtggaaaaattgtgtggcttggtcttgtggcatgtcccttcttttagagacctcagattcaatgtgaaattcgggatttttgattttcaaagatctagatgccctgccttccagatgtgcctactcttcacatattttaaaattagatcctataaactgcaaatactttgttggcttctgtgagatcagaggtccagttagaaaaggaagacagtttgttaaaattaaaaactatttatctaatctaactagattggcctccaaatatgactttctgacattcagctggttactctgaaaagatttctaaatctcttgaggctcatctatatgtttccttgcaaagaaaaaaaaaaaaaaaaaaaagcaagcccaagcactagtaagaaaaagatttgcaatgtttcatgaaaggagtagatgagtgaagcatttatttgtagatactgggttggatacctgtgcaaagaagaagaggtcaataataaaaattgccaggggatttcttggaacttaacaagctgaattaaatatagaaatgtcaggaaatcaaggcaggaaatactcacttgtggttaggcagacagggcagggttctgagcttgagatggagcaaacagttgtggtgggtgaagttcacatgctttagagctcagctgtcctagtaaagaagcctaagagtctctaaagctcttatgagaagatggattttttttgcctagattaaaaggttaaagaattgctttaagttggataaaataaagctaaatgtttaagcaagttgtgaaaggtttatgaaaaaattaattaaaatatttttgtgtgtaaacatattgactaaagttgaaggggtataattcagcatttctgtaaattgagcattgaaataaaaacacaatgggtttctcttagagcactaacctgctctttaacaaaaattgtaaagggttatagaaagtctataaaaatgttaccttatggtcaaacattaaaattgggtaaatatgtctatcaggttttattaagaattaggtttaacattaatagtacactaatgtaaaggtgaaatttggcttatttggtacaaaaatcatacaggaagcattgtgaaatataaaatgatttttagctttctttgggctatatttctataaatatgttattgatgagggttccaaagttatgggagactcctataattctgctatatctcagtgtacattatcagtcataattataattgtcatgttaaattattgtgggccacagaggtaacagatttccttgtcaattgtgtctttgactatgactaccctaaaacgttcagtcacccatatacacatgttaccttgttttggccctctttagaaggtaattttataatcagctataaagccctaacaggtgctcttaaatgcaaattttgataactttggagattgtgacatcagaagagaggaaaaatgttcgggacacttggagagctaaaatgttcattgatatcaagcaggacaggaattaactgcatgaagtgaactaataggaggctgaagtgatctttttgactttttgcttaaaacgttgctgatcctttgttttgcttttcagagtcaaggcaaattttcttttgagctattgacagcttttaacgattaatcaaaatatactcctatgaacaccatttggagcattatttgtttctctctacccgatttccccagaatttggaaactatttgtgggtattcttaatttatggcaatatagttatttgcataagtgcaataagaatgtgttttctttggtaacaggacacaatttgaaaaactggttattttaccaaggttttgaccagaatgctgtgctttcctttaaggaatcaaacttgacttgtggagctaataaagcctttggaaaactgaccttatatcctgtgaacacagtccctgtacagggttactgatctgtgggaagaaaagaatgtcacattctgacaggtcaggaatcccaagttatcttgaaacttcaagaggacaggaattcacccaaccatatgtatttgatggtagaaatccatggcaggggctcagctttaaaaagtcttatctcagattccttctataaaacaaagtcccattaaaaccaattttaaaagcctatgtgaaaaataattattcttgctgcacctcgtacaaataaagtggcaaagcataataaagcaaattggtcctgtcgtaatttgtctttagtaaaaacgggaaactggggtcgggtgcagtggctcactcctgtaatcccagcactttgggaggctgaggtgggcagatcatctgaggtcaggagttcaagaccagcctggccaacatggtgaaaccccatctctacaaaaatacaaaaatgagccgggcatgatggcgggtgcctgtaatcccagctactcaaggggctgaggcagggaagcggaggttacagtgagtcaagatcgtgccacttcacgacagcctgggtgacagagcaagactccatctcaacaacaacaacaaaaaagggtaactggagagagggaagttatgtttcaaaaacttttggaaactatagtacacctgtttttaaattctagtctggcattcagtttttattattttctacagtttgggttaaattcgtatttctctggctacaagtctcctaaataatcttttcatttgtttcctttttctttccctttttccccatttttcttaattggaaatcactgaaacctaagctgtgctttcttaaagccctgtgaactgaagactagacaaccgaaacttctgaaggaagtagcagcaacctatttatatgtgttgctgttgcctactattatgttttagcaggtgctgcctctacacccccgaaacagagagtgctactgggaacaaatcgactttttccactccagtgctgcattcggtgccccataacgatgaccccctctcagcaggaagtagccagaaagattacaatgctccatctccctatgattcttgtgataaataaatatacaagcatgatagaaatcatgcgcaaattgacagtggggattgtggcaggccagatttcactaatggaggtccccatcacaactacttcagtactgactgagtggttaagttcagtatcaaaagctgaaagtgccagcgcctttctacaaaggctagaatgtaacaaaagcccaccaagggttttacctaggcctttcctgggccttacagcatgacaaaacaaagaaggaattcttaaccagacctgtttaggattaaacaaatttaattgggggtctgaagaaactcgccaggcctccacaaacaagttcattgggggtctaaaggaaccccccccaaacctctgtgattgagcaggagacaaggtcagggtaattgccccagcacctggactcatttagatttaagtaaatgtactgaggctccagagaaaggtctccaagacttagactagagttacagattaaaagaagttaatcacttatatctttagataaatgcacactgacacgtagacatacatcttagaaaatatataagctctggaaaaccttgtaatttacagttggtctggagatattttctgggccttctctctgtaaccggttccagaaataaaaaactctcttcctccccagtttatctgcatctcgttattgggccgtgagaaatagcagccagaccctgagtttggtctgggaacacactggctgggcttcctgcctggcggtagagcttcactgtcctccttcccagccaaaatgtggcccttgaaggcttcctccccaactgaccggttttgggttctaggtactcagggaacaccgtcttcaaggaggccattttcatactgttcctggtttgatttttctgaaattaggaaatgccccttgaggcatccaggattgtctttatttcccctgaagcttcccctcctgaagaaaaaagttctcaaacaccctcaggactcaaaccccaagttcaccctgtgaaacattcccatttcctaaacccaggcaggctcatggccctcagcctctcagaccccatggaaacctcctcccccacttcacgggttctctccatattgagagcctcccctcctcggcacacaacccagagactcaccccaacatgtgtagcaaatcaccctggaaacaatcatggctgaacgtggtagcccatgcctgtaatcccagcactttgggaggcccaggaggtggatcacctgaggtcgggagttcgagaccagcgaggccaacatggtgaaacctcgactctactaaaaatacaaagttcactgggcattgtggtgtgtacctgtaatctcaactactcaggaggctgaggcaggagaatcacttaaacctgggagacagagattgcagagagccaagatcgcaccattacactccagcctgggcaagaagagtgaaactacatctaaaaaaaaaaaaaaaaaaaggaaaaggaaaagaaaaaaaaaatcatgaggcaacattgcatttaacaatattttatttatcaaaagacacttgtctttctcaggtaagtgaaggtctagagatgaaacgagtcccgatgtaaattgccccatgggcattgctgagatcacaagatcatcactgcagcatgcagcacaatagtaaatttctcaggatggaagttcaacaatccaaaaggtagtattttttttcatgatgctcagtccatcatacgaaataaaaataaattccttttcatgatcatccattcagtagaaaaaatgatagtaaatttgttctcatgaagatttttaccgtaacatataggatttatcgttattattattattctttgttttttgtttttttgaagcggagtctcactctgttacccagtctggagtgcagtcgtgcgatctgggcacactattaacctccacctccagggttcaagcatttctcctgcctcagcttcccgagtagctgggattacaggcatgcgccaccacacccggctaattttcgtatttttactagagatggggtttcaccgcattggtcgagctggatttgagctccggacctcgggtcatccgcccatctcagcctcccaaagtgctgggattacaggcgtgagccaccgcgcccggcctcaatttatcattattcacgcatccacaaactgggttcttatattttgtacgtgattttttccattgaggagagatatctgtgcatattcatgctgctcatatttcatccacaaactcggttcatatttcatccacaaacataattttttccgttgagaagagatacttgtacatatttatgctgttcaaattcacatttcatcattcttttacaagaaatagataatgtattttaaggttttccagtggtattacagatattttactgggtgtatagatagaaattaaaccaaacttctttgttctggccgccagtcatgcatcctgttttcaacatagttcacatacaactggttgtgtaaaaatgaaattattttgtttagtacaatcatcaacagttggttgattagatttttaattatcaagttaatcattgtcattatgcttctcatcgcactcgtcattaattgctgtgggaggaaatttgttatgttccctatgagagggtgtatcacaaattcaaataagaattcaacgacaatggactgtataaaggaaataagcaagtccatggaaaacatatttttttccggaaaggattaaaatatttttaaaaaggaattaaaaaaaaattgggcacggtggcaaatgcctagagtcccagctgctcaggagatggagacagaaggattgcttgagcccaggaataagttggaggctgtagtgaacagtgattccaccactgtactccagccagggcaatagagggaaaccctctttctaaaaagacaaaaagaaacaaaacaaaacaaaaaaacaccacatcaaaaaacccaacaacaaaatgaaaaaccaaataacagcaatacaattggagctattcgatccaaagaagtaaatgaaacataaagcaaataaaagagaaaagctaatacctgtgtcctgcaggactcagtccaagttctgctctgactccctcctggtgagccaccccttaaaaagtcacttggggcggggttactttgacagacagtcttctgtcaaagagggaggcggtaaatagcacttttttttttttaatttaacgcctttccaacaaattagcggctatgttgtctaagagtgcaaatgtcagaggtgggtacaggcagcaagaccctccccacaggggcagcagaaggaggaatgactaagggaacaagactttagtgtgctcaactacacaggacaggaaacagatgctttttacaaaagctggtggacttgaaggcagaatattttcaagttcctgtaactgcgaactatgacctgtagcctgtgagagtgactttctgtggcaaaggagcttttgtgaatgtgaggaagttaattatcttaacagtgggaggttctcccggcttatctagctagaccctcgtgaaatcccaagtgtccttaggaaggggaagcagagagagatttgagtccagaagaggaagaaggtgatgtgaggcccagtaggggaacaaagggcgatggcatgtaaacacttagcccccagaagtgggagagggctggggttcatcacaccagaatccctaacaatcagccttattttaattacccttgaaatggaaggaggccttagagagccagaggcttggaggggcaccctctgctgcatacacagatcccaactgctgtgggctccaaataattgcaccagggaaatcacaaattatcaaaaataaaggatgtaaagcttttaaaaaatattaaaagcccaacaaataaaaaaagttctaaatctataaaattgacctcagtctgtatatttagatgagtcatgtgtatatagcgtttcacttcaaaatatatgataaatctctcattcattggcttaaaaataaacacttcaatcaagtctttatcagaaaaattgaaacgttaactcaattgccttttagttcatgtgactttacaaaacttaaaacaataaagtcagttttaaaaattattagtaaagtaaaagaaaaatatcttcacaatgtagacattttgtccacatgagacatgtgaaatattgccattactaaatatttgcaggtcaaaaactgtttccaaaacattttaaataatcatctggcctgtctgttttagagcattcaattctagctgaggtctggggacatgtgaaaggagccacggcccgactccgtgctgggaagagtcagacattttccacagctctgtcctttgctgtgggctctgcaactcctaccaattaaaattgcttacgtttttgttttatttttactaaagaggggttcctaaaagctaacattatactgagtatatgtaactaaaactactaagaaaacaatttcacaattatacaaatgtgccaagtaaatgaaaaaataaactgtattttaataaaggttataaaaagaaaaacatatagtggtgtgaggactgtctcaggtcttcactgagcaagggatcatgacattctatggcggacagctgaccttggctttctgctcctcttgattatgtctactaagtgacatacttactctttttccacctgtcttgcctctaagggtaacaggttttatgagatccctcctagtgctttgcaggtcagcctccctttgctgcattccaattttactgcctataccctccagctggcttttgatgacaaaagtcctggtcccagccattctcagattctgtcatccccgtgggcactatggagctcagcactatgggaggttccccaaaaatctcgttttctatgaggaatggccaccacctgcatctcagtgatgctagtgacccctttcctactcctgtgctcactggtcctcatgaagatcctggttggtctgtagccccctatttttcctattaaagagaaattacagtaagacccatttgtgtgcaaaatcaattttaggcttattacacttggcctgataatttgcataaaatgcagcaagaattcatcggccatataggctacttttgagttaattttcctgggtttttacctaaaaatatactattttggttagagtcttgtgaaaataaccaatgtgttcaattgttttattttaaaaggctcttactgaacactataaatatgtataagttgaatatacaaactatattgtcataaaatcacaacccaaaatgtggagaacgcagagggaaaggtaaatttgctcgcaaaaacatacttcacccaaataactggaaaaaaaaaaagactttcatgacccttctttaaccagagcagcagctttcaaacaaggtgtttgccttggaaatgccattcacaagccaaacggcccttgagagctgtctgtcaggcactgtagaatctagcagctcctcacagagttagaaatagtttcaggaaagagattccctgcttttagtaactgcactttatattcccagatagcgagattgtatgtaaaccatttttatcttattctggaactcttttgggtactttttttttttttttttaaatgatggagtctggctctgttgctcaggctggggtgtagtggtgcgatttcagggtatgagaaaatgcagctggacctggctctttccaggaagaccctcacagccaaggagtccaaagcctggggttttcatctaattccagtgtgactggggtaggagcagctttggtgctgggtgtgtgtgtgtgtgtgtgtgtgtgtgtgtgtgtctatgcctgtgtctgtttagggtgttaggctcgtggttgtctagatacaaatgtcccagggctcaggagccccagggttatgtcaggggcaccagatgaaggtgtcaacagaagttagggcacaagggacaaaggtgagagcaaggttagattcatttaggtgcaagaaatcatagagggaggagggagaggaagccctcctgctaccaccgaggaagaagcgcagcttaaggcagaaagcctgtccggagaggaagtgagtttgagggcagggctctctgggtaaagtacggtctgggacaccagcctgggggaagggtacagaatgcagagtggcctggcgtggggactaagaacagaggagagcagctttcactgggagggtcagtgttttcagtgtccagcactgagcaaggtgagatttgggcagcttgctgtgaaataaggtcaggctctggcattgtccccattgcgtgtgtgtgtgaggggcactttgggagagtgaactctccacctccatcctctcatacgtccttcaaccgagcttgccagttaccctgattccaaggagatctatttattgttgacaatactggatcctagcagaggctgggtaggagcctgggcacaagcaagtggaggagggggcctgggcctgaaagacctgggaggtttgagagaggacacagcccacagaatggagcagatggggtagagtcggcaagcattcagggctcctagtaagttggacaatggagaccctgaaagatccagtaaaacggggagaacaaacaggtccccaactcacatccttgcagtgcctggagcttcagactccagacaggtggggaaggaaaattgagggatgtgaacatgttggagaatgtcgtgccctgaagaatgaagaaaaggggggtgaggaatgagagcaggaacggcttccagtgcctggtgcccaggagaactcagaaaatgggtgtggtggagaggaatcgaggaaccggaagtggtggaagtgtgcagggcccctccgagatcactgtgactgccaggcgtcctccctggctggagagcttcactgtcctccttcccagccaaaatgtgtcccttgaaagcttcctccccaatggactggttctgggtcctatatatttgaaggggtggcctgcctctccacacctgtgggtatttctagttgggtgggaggagagacagagaaaagaaataagacacagagacaaagtataaagaaacaacagtgggtccaggggaccagcactcagcacaccaagggcctgcaccggcaccggcctctgagtttcctcagtttttattgattattattttcattatttcagcaaaaaggaatgtagtaggagagcagggtgataataaggagaaggtcaatgaaaaacatgtgagcaaaagaatctatatcataattaagttcaagggaaagtactatgcctggacgtgcactcaggccagatttatgtttctctccacccaaacatctcagtggagtaaagaataacaaggcagtattactgcaaacatgtctcacctcccgccacagggcagcttttctcctatctcagagttgaacaaatgtacaattgggttttacaccgagacattcagttctgaggggcaagcaggagacagtggccttcctccatctcgactgcaagaggctttcctcttttactaatccacctcagcacagaccctttatgggtgttgggctgggggacagtcaggtccttctcatcccatgaggccatatttcagactatcacatggggagaaaccttggacaataccccgctttcaagggcagaggtccctgcggctttccacagtgtattgtgcccctggtttattgagactagagaatggcaatgacctttaccaagtatactgcttgtaaatattttgttaacaaggcacatcctgcacagccctaggtcccttaaaccttgatttcatacaacacatgtttttgtgagctccaagttgggtcaaagtggctgggtcaaagtggctggggcaaagctacaaattaacaacatctcagcaaagccattgttcaaagtacaggtctttttcaaaatggagtctcttatgtctttcctttctacatggacacagtgacagtctgatctctctttcctttccctacatatattcatggaccacagtcttcaaggagtccatttcctcactgtttttggtttgatttctctgaaattaggaaatgccccattgaggcacccaggattgtctttacttcccccagagcttccactcctgaggcaggagcttctcaaacaccccccaagactcaacacctaatttcaccctctgaaaccttcccatttcttaaatccaggcagggtcatggtccttagcccctcagatgctgtggagaccttctttccctttcatacattctctcaagattaaaagccacccctcctcagcacacaccccagagactcaccccaacatgcattgcaaatcaccctggaaacagtcataagaccacactcatttaataatattttatttatcaaaagacactctttctcaggtaagtgaagttctggagaggaaaagaggagtcctgatgtaaattgccctgcaggccttgctgagatcacaaggagattgttactgcagcttgtagcacaatagtaaatttcttctctggatggaagttcaacaatccagatcgtagtatattccttttcattatgctcagtccagcaaatgtgatgataacaaattccttttcatgatcatccattcagcagagaaaatgtttgtaaatgtgttttcatgaagatgtttaccataacatacaggatttaccattatcaatgcatccacaaactctgctgttgttttttatacataattttttccatcgagaagtgatagttgtacatattcatgctgttcatatttcaaccacaaactctgctggtttttttatacgtaattttttccattgagaagtgatacttgtacatatttgtgctgttcatatttcatgtttcatcatccttttacaataaataggttatattgtattttaagtttttctaactgtagtgcagaaattgtactgggtgtatacatagatatcaaaccaaatttacttgttctggctgataatgcatcatttatttcatagattatgtatttctttgacacatttcacgtacaactaattgcataaaaatgaattttcttttagtatagacatcagcatgtgcttaattcggaatttaattgttgagttaaacatcgtcattgccttttccgttgttattaattgctctggtgggaattttgttatctcatacataagacagtgtgccacaatatctcttaaaatttcaatggcaataaactttatatttaaaaacagggaatctatggaaaacacatttttttctaaaggattaaaatatttttttaaaataattttctaaaaagttaggcacggtagcaaacgtctagagtcccagctactcaggaggctgagacaggaggattgcttaagcctacgagttgggggctgcagtgaactgtgattgcaccactacattccagccagggcaatagaagttaaccctttttctaaaaaaaaaaaaaaaagaaagaaagaaagaaaaaaagcaacaacaccaaaacctcaccaacaaaatggtaaagaaaaaaaaaacagcaatacaatgtaagctatttgatccaaagaagtcaatgaaatttaaaacaaatgaaagggaaaaagtaatacttgagtcctgcaggactcagtccaagttctgctgtgcctccctcacggtgagccacccctttagaagtcacttgggtcataagttaacccgataggaagtgtcctggccaatgaactagggaggtggtaaatggcaccattttaaatttaaattcacggccttttcaacggatcagtagccatgttgggtaagagtgcaaatgtcagaggtgaaaagaggcagcaggaccctcccctagtgcttgggcaacagaaggtggaatcactaaggggacaagactttagcatgctcaagtacacaggacagaaaacatgctttttacaaaagctggtaaatatgaagagggaacattttcaagttcctgtaaccaagaactaccgcctgtaaccggtgaaagtgactttctatggcaaaagcgtttttgaaaaggtgaggaagttaaatatcttaatgttgggaggttcttctggtttatctggctagaccctaatggaatcccaagtgtccttatggagcggggagcagagagagagatttgagtccagacgaggaagaaggtgatgtgagtctgggtgcgggacagggggagaatgatgctatgtggggatctgggctggggaatgacttagctgcatgagcggagtgacttagactcctgaactagaagaaatctagggctcatcacctcagcagccctaaccatcaaccttatttttattacaggtcttccatcgacggactccctaaaaagccagcggcgtggaggggcgccctctattggacaaatagatcttgactactttcggccctcaaatagcctgactaggcaaataacaaataataataatttttttttaaatcatggaaaatattttaaaaaacaattaaaaagttataaatctataaaatctgcttctgtctgtgtgtctgtatatttagatgtctcatgtgtacataatgtttcactaccaaaatatatgatgaaaccctcattaatcggcttagaaaactaaacacctaaatattttctcagaaaatacaaaaactttaactcaaatcccttttaattcacctgactttaaaaatctttaaaaaataaagcatgctttaaaattattagtaaagtaaaattagaacatcttcagaatttagacatttggtttaaattatacaggtcaaatactgcccttagtaaatattttcaggtcataaacaactcctgtaatcttttaaataattgaattacatgtctgttttagagctttaagttctagctaaagcctggggacaaatgaagggcaccatgccccctctctgtgctggaaagagacattttctacagctctgacccttgcagtaggctttgcaactgctacctatcaaaattgcctacatcctaagtttattattaaaaggagttgcttggagttaacattataatgaatatatgtaactaaaactatttctcatacaaagtatatgaaaaagtagaatgtatttttaataaaaagttataaaaagacatgaacatgtagtttttataaaaaacagtaattttgtctagttttgcagttctaaaaagttatgttaaattcaaaaataaaaaataacaagacaagactcaaggtttaaataagttgtaaaagatttgtaaaaattagttctataaaaattttacaaaaaaaagcattggttaaaatttaaggaattattttgtttttacagaaattaaacattcattaaaaacactctgatacaaggccttaatttgggttcatgtatcagaatagcagggttttcttagaatattaatctattctttaaaagaactatgaatgttatgcaaactttataaaaatcttaccttagagtcaaactgattaaaattccatagattttacgtaaaattttattaaaaattaacttcaacaaaaataaaatttgattttctcctttaaacaaaagttttgcgtaatattaaataataaagcatttttgtttaccttttaaactataaacacacacacacatacacatacaccaacactaaagtcagctgacctcatactgtctttattggatattcttgtttaaaaaactatcttctttggaaaataaagttttttattttaaaccatattttaaattatcattttgactaaatccataacatacagtgatctgtaataattctattttataatatcaagtgttttgaagaactccaggaacagccatgagagaacactgtggtttagtaacactttatttcctcagtttgaaaatagttgtctttcttggggaggccggtttcagcagatgaaaacaagagtcatgatgaaaattacccagcagtggttagtgtgaccataggaacattgtcatcaggtcagcagaaaacatatcagcaaatttttctcatactggcagtgtgtaggggtggatgtttacagttcctgaagccccagtggtcgtgtggtcttttagttttgccatttataggcaacttgtggtaactagctcaattagacacattccttatcacaaggacagagggctttctgtatcctagggttcttgccttggcattccagaagaatcaggtcacacgtggacgtggagaatgagtgcaaggttttattgagtggaagtagctctcagcagatgggggagccagaaaggagattggtttctccctggattggggccgttcagcagccctggctctcctctgactgccccaggcaaaatccacatcgttctataagtcggtgccctgctggtgtgctggtgcctgttgtcatgttcctcttcatgtccagccgcctgtgtgttcctccgctgatgtgctcctctcgacgtcaagcctcctgtgtgtctgactgctagggtcttggggtttttataagcacaggatgggtcttagcaggccaggatgatcttgggaaagacaacattcggtcaggaaaacaaaaatgcctgttgtcatctaggtccgtggggacaagcccaggtgtggagcttttagccagggaccacagcctcctgtatccaacacttcccttcaccttttctatatcattcaaagggatcatgcccttcccatcccagcacttcactttcatgtcatttgccccctctgaagaggtacatctaactgccattagaatatggatgatgaccagtcttagctgcttcctgctgaaagggggcattgttttgggggaaaacggcagtcagattcctcccaggggtctctataataaaagatcgaggtggctactttcaggaggtcctctaatgtactatctggtcccaagtcccatttctgcaacctcctcctgatgtcaggagctgcctgagtaataattttatcctttaggattatctgtccctcgattgaattaggagatagagaggtgtgatttaccaaggcctctcttagcctctccaggaaggcagtgggattttcatcaaatccctggttaattatggacaacttagtataattgagaggcttggtcttagacctacgtaagccctctattatgcacacctgaaagtgtctcctcttccagtcttccatctcattattgggatcccatttagggtccttcactggtgctacttctcttccagttggataatattcgctcccttccctgatgctataggtgatgcaaagctcatccccaaatctctctgctgctggcagagcagcctgcttctcagtgtctatcaggttctgactcaaaagtaacataacgtctctccaggagagttcaaatgttagggtgaaattctggaaagcttctatatatctatcagggtcatctgaacacttgcccagatctcccttaatttgctttaagtcttgtagggaaaagaggacttggaccttactgggcccaaattcactgggcatctgtaggaggggcaagagtgagactgggcttgtttgggatgaagatttctaggaggggccaggtgagaggctgaagctggatacggaggttggggtggacccagaggagcagggcttgagggagctggcacgtcagctgggggtgcgtctgggactcgtgtctttaattccctgggcttgaccctggcagccttccccgagacagcaaacaggagggctggaacaatcctacatgtcagcaaaggtctggattgctttgcaaggtatagaaagcctgcacatttggggcctcagaccatgtgtcctcacatccagagaaaagttctaattgcaggatggtattgaaatgaatggtcccttcctgaagccaagccagtccttcctgtaaaccataatttggccaaacctatgtgcggagggctatgagatgcttttcctctggattctgagggtcaaaacagtcccaatggttcaggatacactcaaggggagtacaagctgggggtggtgaggagaactggctgcccattctgaaagacagggaatagaggtgttcctcatttcccttccttcttttggcaaaaagctcagggtgtgatggggagggaaagcaagcatcttcacttcactttccacctcttacccctgcgccctggcaaccttggcaggtgccggccacaggtacaaatgcggtatgtacccatgaagcagggagaacctggagattaggaattaactgccctcacctatgtttccttttctccctgctgttgaaaaactttgagttccctgggcctttttatcccatgaggcatggcctccttctgtgggatggggttcagtcagcaggaattggtcctgtccatttacattgtgcctgttgcctggctttgaattcctcagacctgctttctctttctagggcctcagcctgaagcttggaattgagtttgggactgaaaaagcatttcagaggctgtttatatccatttagtgcctcaaataagccctgctgaatttgcaattatcagccagcaggggtcactcctctgttaacttccctattagaaacagagcggtggggattctcacttagaaaagaaaaaaagagaaaaacagttaaagaggcaaaaagtggggaatgctgggggaagaaccccttgcttagtgcaagtgggcccctctaatccttataactttcccatccttcccccagttcagaccaggttgaattccttggccatggaaggaaaggttccattgatgcagtgggtgagaagcactctgtagggtcctggctaccatcggttttctcacacccccctcatcccaggcagtggagggagacacttctgcgacattgctccccctgccccttcatggctattgggtgtggcctttgcctgctgcaggcatgcctaggtgctggagctgggagggaaaagggtaaggagaggtgccctggaagccgctcatgcctggggctgtcaaggtggaggcatacatggcacctctaggaaaaattggtctgatttgcacctttggcggctgagccaaatgctcattttacttagtaacattgcctcagcctgtagcaaaactcttaacattataaaggaagagataagatccatttcaaataatgtgtgagagagaaaagagatgaaaggaaaacagagtcttttacctgcaggaaagggagagaagtggcagagttttggaagaaaggcaggcccaacagtttcccattcactcacactcaccttccgagatcccagacgagccaccagttgaaatgggaaaagtttccttgtccccctcacaggaggtggagtgggggtgtggcttgcttctttagtactccgctgctcaaacctctagggaagcatacagactggcaagttgtggggctacaaccccatggcagcatctaggggtagatgtttacagctgctgaagccccagtggacatgtggtaccatgtgctcttttagttttgccatctataggtggctttgtggtaaccagctcaattagacccattccttaacccaaagacagagggctttctgtatcccgcggttgttacctaggtgtaccagaaaaatcaaatcacacgtggtcttggagaatgagtgcaaggttttattgagtggaagtagctctcagcagatgggggagccaaaagggagaatagttttcccctgaagtcgggttattcagcggcccaggctctcctctggctgccccagccaaactctatgtcaatccattggtcggtggcctgccagagtgctggtgcctgttggtggattcctctcagcgtcgagagtttttccctctcaggaaagggagagaagtggcagccacccatgtgttcttgcactgatgtgctcctctcgacgtccaacctcctgtgtgtctgcctgctagggtcccagagtttttttaggcacaggatagggcatggtgggccagggtgatcttgggaaatgcaacatttggtcaggaaaacaaaaatgcctgtcctcatctaggtccaggggcacaagcccaggtttggagccctagccagggaccccggcctcctctacccatcactttccttcaccttttctgtatcattcaaagggaccatgcccttcccttcccagcacttctcttctgtatcaataggtgatgtttttaaaatttcccaactctagtgcaggcatggtactagacatatacatagaaataaaaccacacttattcttctggctggcaagacatagtatttttgccaaattatgtgttgttttgaagcattttatgtacccctggtcatataaaaataaagctattttgttcagtacaaacagcagcattttctggattagaaagttaatcatcttaaaagatcatcacggatttttccattgcactcatcactaattgctttggcaaaaaatttcttatctcacgcatgacaaaatcagccgcagtatctcctagtaatttaatggtgatgatctttataaaggaaataagcacatcaagggaaaacataattttttttaaaaaaagagtaataaaactttttaaaagtcttttttaaaagactgcttttctaaaatagtaaaataaaactccaccaataaaaccaccaacaaaacagaaaagaaaaaataatgatatgatcggagctatttgatgaaagatggtaaattaaatttaaaatgattagaagagaaaaagcaatacctgtctcccgtaggtctcagtccaggttctgctatgcctttctcctggtgagccacctatttaagagtcgcttaaagcatatgttaatccaacaacagcagattaaaaaccaatgcaatctgaactatttgatctaaaaacataaataaaatttaaaacaaataaaagagaaaaagcagtacctgtgtcctgtaggtctcagtccaagatctgctctgactcccttgtggtgagttagccctttagaagtcacttggggtggggcatatgttaattccactaacattggttctggccaatgagtcaggaaggtggtaaatggcaccttttcttcttgctgatttctttcagttcctttggagtctggacattagtcctttgtcagatgcctagtttgtgactactgtttcctatactgtgggttgtgtgtttaccctgctgatatttcttctgccttgcagaagattttcggtttcattaggtcctattgatcttattctatttttatatttttgcgtttgcttttggggcattagtcatgactacttggcctaagccaatgtctagaaaagctttttggatgctatcttgtagcatttttagactttcaggtcttagatggaagtttttatatgctttgttaaagatcaggtgactgaaagtaccgggctttgtttctcggttctctattctgttccattgctctatgtgcctatttttatacttcctgcaccatttattgaataaagtgtcctttccccaattagtgtttttgcatactttgttgaagattagttgtctgtaagcatttggctttatttctgggttctctattctgttccattgctctatgtgcctatttttatacttcctgcaccatttattgaataaagtatcctttccccaattaatgtttttgtgtactttgttgaagattagttgtctgtaagcatttggctttatttctgggttctctattctgttctattgctctatgtgcatattttataccagtatcatgctattttggtgattgtagccttgtagtataatttaaagcctgccttcagatttgttctttttgcaaagtattgctttggatatgcggtcacgtttttggttttgtataaattttaggattcttttttctagttctgggaaggagaatgatgatattttgatgagaattctactgctctgtagatggctttggagagtatggtcactttcacaatattgattctacctattcataagcttataatgtgttcccatttgtttgtgtcaactgtgatttctttcagcactattttgtagttttccttgtaggaaacttacattaacctacttggttaagtatatttctaagtattttacttattaaaaattctcagggaaatgcaaagtaaaactgaggtgggaaattaaagaaaaataaaattaaaaagaaagggaaataagctttcttgtattaagctaacttgtcccagaggcagcaacaggcacagcccagacccaggaaaagtcttgataatattatttattgtattctggagactcttccagcactccttcaatgtagggagaagaaaaacaaattttcctttgttttatggtatgagtttatagattcttgttctctttaactagtaacttcaagtattctgttttatctaagaagtatggcaaaggtcatgagaagcctgagcaggcctgaactacagctctctaggcaccatagtgaagataaaccaatgcaagcctctttagagcaaaacctagataatagacatctgggttgcatagcaacagttatgtgcaatcctgagttatgaacctgttacaatttgattaactgtctttttcctgcctctgtatccctgctttcacaccactgtaagcttgcttcaagctggcccacccccttttgtgaagtgtgtataaaagtcaagtgctgtctttgttccaggccctgtctttggacgtgagtctgctgggcctgagagcactcaataaaagattctcctgttttaacccaaagcctctctctcatcctcctaaatcccacaacaaaaccacaatgagatgctatcttaatcttgctagaagcccataatttaaaagtcagaaaacaatagatgttggcatagatgtggtcaaaagggagcactttgacactgctagtgggaatttaaactagtccgaccactatggtaaacagtatggggattccttaaagaactaaaagtagaccattcattccagcaatcccattactggctatctacccaaaggaaaagaagttattccataaaaaagacacaagaatatggatgtttatagcagccgattcgcaattgcagtgatatgggaccaacttaagtgcccatcaacgaacgagtggataaagcaaatgtggtacaccatggaataatacttgataataaaaaggaacaaaataatgtcctttgcaacaagttggatggaactggaagccattattctaagtgaagtaactgaggaatggcaaatcaaatattgaatgttttcacttttaaatgagagttaagctatgagaatgcaaaggcataagaatgatataatggacttggggactcagggggaaaggttgggagggggatgaggaataaatgatgacatattgggtatattatacactgctcaggagacagatgcctcaaaatctcagaaattaccactaaggaacttttatccacataaccaaaaaccacatatattccacacactattgaaagaaacataaacattattttaaaaaataaagccacttttaaaattagcaaaataaaataaatatgtcttcagagtttagatattggatccaaattagacagatcaaatactgcctttactaaatattttcatgtcattaacaacttctaaaacctttcaaacagttttttgacatgtcttggaaccatccatttctagctaaggcctgggcacctgtgaaatagggccatgcccccccttatactgggaagagtaagatatttcaagactaagatgttttctacagctccatctttttctttaagctctacatcaaggacataattaaaattggttgtctcctaagtggtttactaaaaatgcatacttaagagttaccattataattaatatttgtatctaaagctacttaaaaattttcacacacaaatctgactgaacaagtaaaatatattttaagtcaaagtttataaaaggacatgagaacatagcttttatgaaaaaattagttttgtcaagtttagaggttttcaaatattttaaattcaggaaataaaataacaaaaagacaaaagaaaatggttgaacaacttagaaaaggtttgttaaaattcatcttataaaacaatctacatgtaaaaagtgggctaaaatttgaaagagattatttaggttttccataaattaatccagaaggggtaggaagtcttaagaatgaggaaggacaggaggaaggggaggtcatcctgacactgcagaggcagaagtgcagctgaaggtatgaaggctaagaggggaggggagtttgagtgctgctgcctggctgtcagagcagaggagggtcctgggcaccagacttgaggaagggatgaaaatgctgggcagacctgtagtgggcccttgagatggcagatagtggtttccagagagagggccattgttttccagtgcccagcactgagcagagagagttttgggcagtgtaaaaaaaaaaagagaacttacctctttctcgttttagaaaaagaacagtctaagaatatcagcagggaaactctcagtgcttcaaggggttaaacgcccttttggctttcttgtgttggtttcatcatagaggaggagaaacttcttggaagtgttcctaaaaacacaacacgtctgcttctcctttcaaaaaaggaagtgctaaaacacgaacactctagatccaaatattaatacggatgtctaaatgcttccgttttccaaggggcagaaagctaaaggttgtaacctattcatttcagtcaaagttggtgaaagggaagcaaaggaactgggtggggcttggaaggatgacgaagctcaagctcattggccagcaacctctctcctgggggcgggaggggtgagcatacgtcattgctttggcttctataaaatgaggaggactcaccgagtgtgaagagtccttctggtgattgcagctgagagcacactcacgacgttctgcaaggattctctgattatgattctgaagggaaaagcgatggaatggacagcagagattgtaattttctttatcttgaattacggaagaaagtatctaggacagaaatccacgacaagtccttggaaccagcagatctcttcgttcacggagacgttgacgtattctctattgaagaagattcttaccttcttactggacaaggttttgtcagttctgcgtgactggattgtccgggagactctgaggaaactgatgtcacatgtttttccaaagaagatgtttctggaaccaacaactgtgattgtggtttgaggacttctgagagttccagtacaggaaataagcagaacatcagctggaggctaaacggatccagacttcactcttcacttcccttcctattcagtctattgtgcctgctgactgagaagcttggctggtatgtgagcaaataaacggaactattcagaaggagatgttgacatattctgtattgaagaagatccttatcttctcacctgacaaggttttgtcagttctgtgtgactggattgtccggaagactctgaggaaactgatgtcacatgtttttccaaagaagatgtttctggaaccaacaactgtgattgtggtttgaggacgcctgggagttccggtatgcgaaataagcagaacatcagctggcggctgaagggatgcagcctccactcttcacttcccttgccattccatctattgtgtctgcctgactgagaagcttggctggtatgtgaggaaataaacggaattataaacaaggagattgtttctcatctacttcattctgttgtggcttttctattttggggttcagggtgtgtgacaaggaccaaggagatgaaaggtttcatgatggagaaagcccaggcaatcagattgaagagctatccacagggaatcttggctgctgaggggctgcaccctgcaacggactgaccatatgacagaaaagggttttaaaggctcaacttctggactgagaacccagagtaatttgggaacctcctctgtgaggagatatgaaagctgggaatcatgacatccctaggaatggaaggcacatttcctgatggaaggggtgctttggaaaacaggagcagagtagacacagcagccttgtggatacgggtgggcagcatgcatgggtgatgtgaacgtggagtgtttgtgatcgaaactcaaaatgtctgacaaagtgaaaacctagaaaccacaatgaggaggaagagtttgtgagggcaatcactctccccatgtgtgaaaatcgggggctcttaaaatctcatctggagaggtgcagtctaccaaactctgggactttagcctccccttttaaaaaaccgtgcatcaataccaacgtccgaaaccacagaaataacacctggcttgcatggagacaaggacaaaaagccgtcatgatgagttgttctgctcacttgctgcctctgttcagtgcacaggatattgtccacccactagcaggctactgcaagagaagtgtgcaatatgttccctatgtgccatatatgtgccatatggcccatatgacaactgagtcagaaaatatctgatgccctcagagttacactccacctggagcttgcccccagccatccaggacctaggctccctaccctgtccaattttctggtgttttgggggcttcattctctaaggtgtgcccactctttactcaaaccaaaacacccacatattcctgcccatgaacaaccaatcaaccacttctcagttccacatcctgctgttgggtctctagtggtgacactgtaactcccaggtcatagtggtgacactataacacctagctaaattgatgccttgtctctaggaggccatgggctcctgcaggtctcatctgactctctgtagccttccctgacaatgctcacaatacccaagccagagccacattgacagcaagctgctctcatcttacctttgccagacctggccactggaaaaggctgaccctcatcctgcaatgcctatacctccaacctttgtctcaagctggtgtcctggagggacttctaagcagaaaacagattcagactcccatcctctcctgaatggcctcatatccaattctcagaccctcagccttcattgtaaggacacttcatccatgcccttgagtattctgtctgcactgtgtattctgcaatagattctcctccctctgcgaccctcaactccttccgcagactttttgttttcttgatcatctaccatagtcttccactgggacactgccaagcccattctggagagtgagttgtgcaagtacactgccccccatctacctttcgggaggtgtatacacccttctttctcccaggtctggaggctttctattttcatcctgaggcatctccacctgctcttggattcttcaaattgacaaccaccagttaacaagaactatgtgtcaccaaatagccaaacaatggcaattacaaaaataaaattaatagctgtaacccccattagcaaggatacacaaatcaaatcagggatagtgggtgaggaagtctgcctaacattcaaggaaggattctgaagtgatacaaaatcattgcctttgctatctttagaatggacactttcagccaggcacagttgctcagcctgtaatcccagcactctgagagccccagttgggtggatcacttgaggccagcagcttgagaccaccctgggcaatgtgcagaaaccccaactctactaaaaatacaaaaatagccagttattgtggcacatgcctgtaatcccaactccttgggaggctgaggcacaagaatcacttgaatctgggagccagagtttgtaatgagcgaagatcatgccactgcactctagcctaggcattagagtgataatctgtctgtggaaaataaaaacattcctcttcaaagttttcttctttaaatcataaatgttggaattaatatatcctctttgaaactcactttcttcaagcttctttatttgatggtagtaaatctttgttaagctttatgaggcaagagtaatggaagaagcatattatatatatttatactctaacctcagtgcttgttctagcaagctcaggcatgcgtgaatgtgcccaggcatgttccagcccataccttatatcctttccttattgggaaatgctgttactcctataagcattcttgtaagcaacttcctctttttctttgtctccactatctttacctattgaggacagttttaggttcttagccagttggatgtagcatagactgtgaggtccaaccccagccaatggagatagcacacagcagtagcgacctcatgcttaacagataaatattcctgtctccctttgtttggggtgctctcagctgatgagcaacaccctttctaaagaaattaaagttgtcttgctgagaaaacttttggtctaaatgctgattcttccttgcagcactgaagaagaagcaattatttccaacactttctcatacacaaaaaaagaagaaggtggaagaaaactttcttgtgcaccctatccctcactcagaaagacaacagaaggctcctagtggcaagccctagaggattcatttcttttgggaaccctcttggctgggatactaggactcaggtcaaactcagcattttcagtgtgtgggaagtgtgcttgggtttcactgttacttccaataatgtgatttggtccttggggttcaccaaattttggtatggagtggtgaaccctgttaagtttaagtgtctataaaattaacaaagcaaaataaccattctgccccatggttcagagaccaaatattgtgtaggaaatgctttagcgagagaaacagagaagaataaaaaatgtcctcaagcgctgcattatttcttgttatcgtccagatcttagaggaaaggctttcattttccctcattcagtatgatattagctgtgcatctgtcatttatggcttttattatgttggggtatgttccctgtgtatgtagttttttcagggtttttgttatgaagtgatgttgaactttatcaaacgtttttcagtttcagttgaaacgatcatatgctttttgtccttcattctcttgatatgatgcatcatgttgatgatttccatatggtgcactgtccttgcatcctgggcatgaattccacttgatcatgacaaatgaatttttaatgcattcttgaattccgtttgctggtattttgttgaggatttttgcatcaatattcatcagagatattggcctgcagtttctttttttttcttttttctttgttttgttgtttgtttgtttgtttgttttgatgtgtctatgtctggttttggtatctgggtagtagtgttccatccccttttattttttagaataatttgaataagactggtgttggttctttaaatatttggtagaattccgaagtgaagtcattgggccccgggcttttctttagtggaaggctgtttattatggcttcaatctcgttacttattattggtctattcatgttttgaatttgttccttatttaatcttggtaggctgtgtgtatctaggaatttgtccatttcttttagattttcaaatttattggcacataattgcccattgtagcctctaatcgtcatttgagttcctgcagtaccaattataatgtctccttcttcatttttgattgtatttatttggatcctgcccctttttttcttacttaggctgcctaataatttcttaattttgttgaactttttcttttgtttgtctcgctctgccaccaggctggagtgtagtggtgtgatcttggctcactggaacctccgtctcccaggttcaagcaattctcctgcctcaccctcccaaatagctgggactacaggcaagtgccaccactcccagctaatttttgtatttttagtagacacgggttttcaccatgttggccaggatggtctcgatctcttgacttcataatccacctgcctcagcctcccaaagtgctgggattacaggcatgagccactgcgcccagcctaattttgtttaaattttcaagaaatcaacttcttctttcattgatttctgtattttttatttccattttatttatttaaactctaagctttattctatcttcttctcattttagctttggtatgcttattgcctctctagctctttaatgtgcattgttagattgtttatttgaagttcttcctctctacaccataagacgtaagcatgtcctcattatgtcataagatgtaaccacttacagctataaacttccttcttagttctgcttttgctgtatctcataggctttgttatgttgtgtttccattatcaattgtgtcagaaatttttcaatatttttcttaatttcttcattgagcaactgatcatttgggagcatatttttaaacttccatgtacttacatagtttccaaaatacctcttgtgatcaatttctagttttattccactatggttcaagaagatgcttgatattatttcaattttttttcacattttaagatgtgttttgtgacctaacatatggtctactttttttttttattaaactttaagttgtggggtacatgtgtagaccgtgcagttttgttacataggtatacacgtgccatggtggtttgctgctcccattaacctgtcatctacattaggtacttctcataatgctatccctcccctaacctccaccctctgacaggacctggtgtgtgatgttcccctccctgtgtccatgtgatctatttttgagaatgatccatgtggattagaatgctgtggaaaagactttggattcctaatatccagggagggagacgatgatattactttcaatatcacacgggtgtacacactctctgtgacattgttcctaatatccagtggaagagaggatgatataacacccagggagggagaggatgatattactcttaatattgcagggtgtgtacccatgcctatgatattgttcctaatatcaggagggggagaggatgatattactcagaatatggcagggggtgtacacacactctgtgacatggttcttaatatacaggggagaatgggacaatattactctcaatatcgcagggggcgtacaaccctgtgatttgttcctaatatacaaaaggggacagtatgatattgttcctaaaatcgcagaaggtgtacaacgccctgtgatattgttcctaatatccagggcgggagaggatgatattacccccaatatcacagggggtgtgcactttccctgttacattgttcctatgatccgagtggggggaaatgacattagtcccaatatcgcaggatgtgtacactactcccccatgatattgttcctaatatcaagggggagagaggaggatattactcccaatatcgcaagggaggtacatcctccatgcaatattgttcgtaatattcaggaggagagaggaagatattactctcaatatcgcagaaagtggacacccaccctgtgatgttcttcataatatccagggaagcagacgattatatgactttcaatatcgctgggagtgtacatcccttttgggatattgtttctaatatccaggaagggagaggattatattacttccagtattgcagccagtgtacacatttcttgtgatattgttcctaatatccagaaagggaaaggatgatattactcccaatattgcaggtggtgtacacccccctctgatattgttccttacatcaaggaaaagaaagaagaatattactcccaatatcgaagagagtgtacacccctcctgtgatattgtatttaatatccatggggaaagaggatgttgttactcccaatatcgcagggggtttacacccacactgtgatattgttcctaaaatccagtgaaggagaaaataatattgctcccaatattgcagggtgtatacaggccctcccccgttatattgctcctaatatccagcggtggagaggatattactttcaatttttgcagggagtgtgtaccccctctctgatatttttctaatatcaaggatgggaaaggatgccattactcccaatatcgcaggaggtgtacatgccctgtgatattgttcctaatatccagggaggtagaggatgatattactttcaatattgcaggggctgtacaccctctatgatgttgttattaatatttaggttgggagaaaatgatatttttcctaatatcctgggaaggaaaggatgatattactgtaaatattccagggagtgtacaccttcctaatattctaatattgttcctaatatccaggggtgggagaggattatattactcccaatatcgcagtgggtgtacacccctcctgtgatgttgtttctaatatccaagcgaggagaaaatgatatcactctcaataccgcagggggtgtacaccttccccatcatatcgttcctaatattcagagggaaagaagatgatgttactttcaatatcgcaggggttgtacacaacccctgtgatatttctcctaatatccaggaagaaagaggatgatattgctcccattatagcagacggtatacgcctccctgtaacattgtttctaatatcaagactgggagaggatgatatcacttccagtatcgcaaggggtgtacacctcccccgtgatattgttactaatatccagggggaagaggataatattactttcaatattgcaggggctgtacacccccgtgatattgttgttaatatttaggttgggagaaaatgatattagtccaaatatcgcagagagtgtacacacttccgataatattgttcttaatatccatgggggagacgatgatattacacccaatatcgcagggggtgtagtctccccttgtgatattgtccctaatattcagggaagtaaacgatgatgttagtgtgaatattccagggagtgtacaccccctttgtgatattgtcctaatatccgcaggagagaagataatattactcccaatatcgcagggggtgaacacaccccctgtgatattgtttctaatatccaagcgaggagaaaataatattactcccaatgtctcaggggatatacaccttccctatgatattgtttctaatattcaggtggaaaacgggtgatattactcctaatatccaggaagaaaggggattatgttactccccttatagcagggggtatacacctcccctgtaatattgttcctaatatcaaggctgggatatacgtggggggaaggatgatattactcccaatatcacaggggttataaaaccttctgtgatattgctcctaataaccatggcggaagaagatgatattactcctaatattgcaggaggtgtacactcccccattatgttgttcctagtatgcagaaaaggagaggatgacattattgccaatatcgcagggtgtgtacaccacccatgatattgttcctaatatttagagggacagaggatgatattactcccaatatcgcagggggtgtacacgcatcccctgtgatattgttcttgaaatcgaggggaaagagaattatatttctctaaatattgcagagggtgtacaccgccccctgtgatattgttcctaatagccgggggcggggggagataattaaattactttcaatatctcagagagtgtacatcccccttgtgacattgttcctaatatccagagcaaaagagaatgatattcctcccagtatcgcaggaagtgtacatttaacctgtaatattgtttctaatatccagggggaagagaatagtaatactcccaatatcgtaggggttgtacaccttttctgtgatattgttgcaaatatttagaagagagagagaatattactcgcaatatcacagggaatgtatacttcccctgtgatattgttctaatatctagaaaaagagaggataatattactcctaatattgcagggggtgtacacccccacttgtgatattgttcctaatataaaggaaggtcgaaaaacaaacggggagcccagggggaaggaaggcaggcgaggaagaggcagcgccggggcgccggagggagcagccgggccgcggaagcgcgagcacgagaccggtcgcggtcgcagtcgcatttttgccgttgtcgcggccgccgccgccgaggcttacccggggatgtctgagcccgcgcctcgcggcccccaagctccacgctgcgcccgctgtcccggcctctaagggccgccacgtccctgcggcgcgcgcaggcagaaagcggcttcgtgccggcggagggggcccgggcgggccgggaaaggctgccccaggccccgcgcctaccccatcaccgcggccggcgccgggccgggaggatgagcggtgtggggctctgaagcatggagggggttttgtacaagtggaccaactatctcacaggttggcagcctcgttggtttgttttagataatggaatcttatcctattatgattcacaagatgatgtttgcaaagggagcaaaggaagcataaagatggcagtttgtgaaattaaaggtgacagctttggaggggaccacccttgattggatacataaattctgttcattcagcagacaacacaagaatggaattaatcattcctggagagcagcatttctacatgaaggcagtgaacgcagctgaaagacagaggtggctggtcgctctggggagctccaaagcatgtttgactgatacaaggactaaaaacgaaaaagaaagaagtgaaaccagtgaatcgctgaaaaccaaaatgtctgaacttcgcctctactgtgacctcttaatgcagcaagttcatacgatacaggaatttgttcaccacgatgagaatcattcatctcctagtgcagagaacatcaatgaagcctcttctctgcttagtgccacgtgtaacacgttcatcacaacgcttgaggaatgtgtgaagatagccaatgccaggtttaaacctgagatgtttcaacggcaccatccggatcccttagtttctcctgtgtcaccttctcctgttcaaatgaggaagcgttctgtcagccaccctggttcttgcaccagggaggagtagccactgtataaaagaaccagtatctgcacttcaccgactctcccagcgacgccgaagaacctactcagatacagattcttgtagtgatattcctcttgaagacccagatagacctgttcactgttcaaaaaatacacttaatggagatttggcatcagcaaccattcctgaagaaagcagacttatggccaaaaaacaatctgaatcagaagatactcttccatccttctcttcctgaagaaactgtagtgtccaactttctctaagtattgctatgcaaaagctgctgtaattgaactattgttatagggagtagttttttcccttaggactctgcactttatagaatattgtaaaacagacaaacaagaaaacaaaccacatacttttgaagcgtgttttatctttatatagtttgtttgcaagagtattttcctaataacttcacagtatgaatgtgcatcttttttttctttttttaacaaatgatggtgtaacattttgacatccataaggacaaatgtagatatttttctaaaaaaccgtgaggggactgacagcttggtcagggtgtattgtagcttataaacatgaaatcttacaaggtttcagtttgacagaagtgtgatatatgtaacttgtgccatggaccaaatggtcactttaccacagctaaaaatgagttatgatagcagcttgatggtgattgcattgtattcctttaatcaaaaaggaaacgcaatattctaagtatctttagcccaaataccatgacatattgagcatctttaaataaccagactgtattgtccttcatatgtgaagttgacactactgatttgtcaataccaaattttgggttaaagtgtttaatttttatttatttattttcttgttgcctcaaaagatgattgcattctaacttttgtgacctaccaaatttaagatgtgtatacattgttctttacgttgttctagaaaagagattttaatgctgtagtgacttagctcacttacatcagagaaataaacaactttcaatggaaaaaaatatatataaaggaaggaagaggatgatattacttctcatatagaaggggttgtacaccccccttgtgatattgttcctaatattcagggagggagaggattatattactcccaatatagcagggagtgtacacccccccccccgtgataatgttcctaatattcagggaagcagaggatgatattactttcaatatcacagggggtgtgctgtccccctgttatattgttcttaatattcaggggggagaggatattattatgcccgatatcacaggagaagtacaccccacaagtgatattgttcctaatatccaggggtaaagaggatgatatcgcaggtggtgtacacccctccccgtgatattgtttctaatataaagaaggagagagcatgatattactcccaatatcgctggaggtctacaccccccttgtgatactgttcctaatatccaggaagggaaacaatgatattgctgtgaatattccagggggtgtacacccctttgtaatattgttcctcatatccagggggtagagaggatgatattactcccaatatcgcagggggtgcacggccccactgtgatattgtttttcatatccaggaggggagaggatgacattactctcaatatggcagggggcgaacaccccctgtgatattgtgctagttaggttgggagaaaatgatattactcccaatatcgcagggggtgtacaccgctcctgtgatattgttcctaatatccatgacgggagaggatattactcccaatatcgcagggggtgtacctctcccctgtgggattgttcacagtatccaaaagggaagaggatgatgttactcccaatatcacagggagtgtacaccaccattgtgatattgttcctaatagccagggaagaaaacgatgatattattgtgaatattacagggggtgtacacaccccctgtgatatggtttttaatatacaggttggaaaaggatgatattactcccaatatcacaaaaggtgtacacacccccccatgatattgttcttaatacttcggtggggagaaaatgatattagtctccatatcacaggggtgtgaactcctccggtgatattgtttttaatatcaagaggggaggagatgatattgctttcaatatcgctgggggtgtacatccctcctgtgatattgttccttatatccaggcgaggggaaaataatattactcccaatagtacacaccccatgtggtattgttcctaatactcagggggaaagaagataatattactttcaatatcacagggtttgtacacctttcctgtggtatagttttcaatatccagggggaaggtacatgatattactcccattgcagcaaggggtgtacacacctcctgtgatattgttcctaatatccagaagtggtgaggatgatattactcccagggggtgtacaccccacctatgatattgtttctaatatccaggggaaaagagtgtgatattatgcccaatatcgcagagggtgtacacttatcctgggatattgtttctagtatttggggagggaggagaggatgctattattctcaatatcgcagaaattgtacacccccgctgtgatattcttcataataatcagggaaaaagaggatgatattactaccaatattgcagggggttacacttcccctttggtagtgttcctaatatccaggaagaaagaggatgatattaatcccattttccaggaagtgtacacccaccgtgtcatgttgttcctaatatccagcagggaagaggatgatattactcccaatatcggagagggtgtacacttcccctgttatattgtttctaatacccagggggaagaaggatgacattactgccaatatcacagggtgtgtaccccaccctgctattgttcctaatattcaaaaggaaagatgaaaatattactcccaatatctcagggtgtgtacacctctcctgtgatatcgttcctaatatccacaggaagagagaatattactctcaatattgcaggggggtgtacacccccctgtgatattgttccaaatattcgggcggggagaggatgatattagtcccaatatcgcagggggtgtgcaccaacctgtgatattgttcctaatatccatgcgggggaggacgatatcactctcaatgtcgcaggaagtgtacacctctcttgttatatttttcttaatatccaggagggaaaagatgatattactgccaatatcgcagggtgtgtccaccccccttttatattgttcctaatatccaatggaaaagaggatgacattgctctccatatcccagaaggtgtacaacgcccctgtaatattgttcctaatattttgggggaagagaggatgatataacttataatatcacaggaggtgtacaccacccctatgtattgttcctaatatcctttaagggagaggatgatattactcccaatatctcaggtggtgcctattccccctgtgatattgtttttaatatccaggggaagagagtatgatattacgcccaatatcgcagggggcatacaccctctctgagatattgttcataatatatagagggagagaggatgatattacttccaatatcagaggtggggtacaccccccggttatattattcttgatatccaggaggggagaggttgatattactggatatatagcagggagtgttcacatcttctgtgatactgttcctaatatccagaaaagtagaggatgatattactcccaatatcgcagaacgtgtacacctccctgtgatattgatcctaacattcaaaggggagaggatgatattactcaaaacatcacagggcatgtacactcccctgtgatattgttcctagtatccagaagggagcaagataatattactttcaatatcgcagggggtgtacacccctctttggtatgtttcctaatatccagaaggaaagagggtgctattactttccatattgcaaggggtgtacacccccctgtggtatggttcataatatccagggagggaaagggtgctattattccccatatcgcgaggcatgtacaccctgctgcggtacggttcctaatatccagggggaaagaggatgctattacttcccatatcgcggggtgtgtacacccccgtgtggtatgttttgtaatctccgggaacgaagagggtgttattacccctcatatcgctggaaatgtacactcccctgtggtacggttcacaatatccaggggattgagggtgctattactccccatatcgcggggggagtgcacctccctgtggtatggttcgaaatatccagggtaagagagggtgctattattccccattttgcaggaggcgtacacccctctatggtatgttttgtaatatcccaggtaaggggtgctattgagagaagagagcaaaagaccccccccatattgttctgtattattttatactcagtacctgttttaagaagaaacaaggaagcgaaaccaaaggcaggcagcccggcgccaggcaccagatccaaaaccagacccgaaaccaggcctgggccttcctgaccttagcctgaaagttaaaattcaacccatgacctagcaactgatgttatccatagattccagacattgtatggaaggacattgtgaaatttcttgttctgttctgtttcactctgagtactggtgcatgcagcccttgtcacatacccactagattgctcaatcaatcatggccctttcatgtaaaaaccttagtgttgtgagcccttaaaaaggacagaaattgtgcactcaacaagcttggattttgatactctagtctgctgatgcttccagctgattaaaagccacttccttcactacctcggtgtctgtgggattttgtccgcggctcctcctgctacactgtgactccccttatagagaggggtgtacacccccctttggttcctaatatccagcgggggagtaggtgctattactccccatattgcggggagtgtacacccccttgtagtacggatcgtaaaatcaaggagggagagaaggtgtaattatccccatatcacagggagtgtacacccctttgtggtatagtttgtaatatccacgacgggagagaatgctattactccccatatcgtggagggtgtacaccgccctgtagtatggttcgtaatatccggaaggggagaggttgctattactccccatatggtgggaagtgtacacccccatgtgatatggttcataatatccaggggggtagaggatgatattacccacaatatcatagaaggtgcacacccttttgtgatattgtccataaaatccagaaggggagaggatgatattacttccaatatcacagggggtgtgtagccccatatgatattgtttgtaatatcaaggtagggagaggatgctattccttacaatagctcaaggggtgtaaccttcttgtgatattgtttgtaatatccagaaggggagaagataatttttttattttaaaagtaaactttaatgtcaaaaatgcaaacttgagaagggcagaaagatcaaacagaaggctgccacttcacaattggagggttgcacagtggccgggcagaggcgctcctcactccccagacggtgaggcagccgggcagaggtgctcctcacttccgagatgttgcaggagccgggcagaggtgctcctcacttcccagaacagggggctgccgggcagaggtgctcctcactgcccagacggtttgcaggcctggcagaggcactcctcacttcccaaacggagcagcggcaagccagaggcgctccacacttcccagatggtggggcagccgggcagaggcgatcctcacttctcagagggtagggcggcccagcagaggcgctcctcacttcccacatggtggggcggcaggctagaggcgatcctcacttcccagacggtggtgtggccatgcagaggtgctcctcacttcccagatggtgtggccgccgagctgaggcactcctcacttccctgacagtggggcggctgggcagaggcgctcctcacttcccagacacttggactccgggcagagactctcctcatttcccagatggtggggctgccgggcagaggcgctcctcacttcccagacggttcagaggccgggcagaggcgctctggggagaggataatgttactcccaatatcgcagggggtgcacactccctgtgatattgttccgaatatccagagggggaaaggatgatatagctcccaaaatcgtggggagtgtacacccccctgtgatcttgtttgtaataccaagaagaaaagagaatgctattatttccaatatagcagggggagtacaaccccctgtgatattgttcgtaatatctagggggagagaaaattatattagtcttaatatctcaggggacgttcatccccctgtaatattgttggtaatattcagaatggagaagatgatattgttcttaaaatacaggaaaaaatatgataatattacttccaatatcgaagggggtgtacactctcctgtgatattgttcccaatatccagaatgaaagaggatgctattactcccaatatcccagggagtgtacacccctttgccatattgttcataatatccaggggaagacaggataacattactcccaatatcaccgggggtgtccacccactagtgatatttattgttcatcatatccagaaaaggagaggatgatattactcccaatattgcaggtggtgtacggtccctgtgatattctttgaaatatctagaaaaggagaggatgatatcactccgagtatcacagggggtgtacacccccctgtgatattgttcgtaatatccaggggagaaaaggatgatataattgccaatatttcaggggatgtgcacctccctgtgatattgtttgtaatatccaggggtggagaggatgatattactcaaaataacgtaaacatcctgtgtgtacatcccctgtgatattgtttataatatccaggggggtagaagatgacattacccccaatatcacagagtgtacacacccctgggatactgttcataatatccaggcgggaaagaatgaactacttccaatatcgcaggatatgtacacccccctgtgatatatttcctaatatttatgtgggtaaggatattacccccaatatcacagaaggtgtacatcctctttgtgatattattcctaacatccaggaaaggagagaatgatattactcccagtatcgcagggggtgtacaccacccctgtgatattgttgctaatatccagggggagaggataatattactcccaaaatcacaggggacgtacactcctcctgagatattgttcctaatattcatggggaaaagaatgctactactccaaatacagcagagggtgtacaccatccccgtgatattgttttttatatccaaagggtgaaaggctgatattactcccaatatcgcagggggtgtacaggccccccatgatatcattcttaatatccagggaggcaaagaatgatgttactcccaatattgcaggctgtatacaccccccgtgatattgttcctaatatccagagtaagagaggatgacattgctcccaatattgcaggggttgcacgcacgccctgtgataatattactcccaatatcaacagtgggtgtacactcctcctgtgatattgtttgttatatctaagaaagaagaggatgatattactgtcaatatcacagaaggtgtacagccccttgtgatgttgtttctaatatccagcggtgagaggatggtattactcgcaatattgtagggggtgtccaacggccctgtgatattgtttctcatattcaaaaaggaaaagaataatataactccaaatatcgcagggtgtgtacacttccctgtgatattgatcctaatatccaggaagagagaggatgatattaatcccaatatcacagggggtgtacatcgcttctgtgatattcttcctaatatccagggggggaggggatgctattactcttaaaatcgcagggaacttacactcccactatgatatttttcctaatatccaggaagggagaaaatgatattactcctaatatcacatatcacaatgggtgtacatctccccgtgatattgtttctaatatcaaggatgggagaaaattatattactctcaatatcgcagggggtgtgcacacctcctgtgatattgttcctagtatccagcggaggagatgatattactttaaatattgtagaaggtgtacaacccccctttgatattgttcctaatatccagggggaaaggagatgatattactcctaatatcgcaggggctgtacaaccctatgtgatattgtttcttctaatatccaggggtggagaagataatattactcctaaaatcgaaggggacatacactccccctgtgatatttttcctaatatccagaaggaaagaggatgatattactcctaatattacaagaaatgtatacctgtcctgtgatattgttcctaatatccagaggggtaaatgattatattactcccaatatcgcaggggtgtacaccttccctgagatattgtttctaatatgcagtggaggagaggatggtattactcccaacatcacaggagatgtaaactccccttgtgatattcttcctaatgttcaggacgaaggagggtaatattactcactgtattgcagcagggggtgtagagccccctgtgatattgtttttaatattcaaggttggagaaaataatattccttccaatatcgcatggggtgtacacccttctttttatatagtttctaatatctggggggagaggatgatattactcccaatatcgcagggggattacacccccactgtgatattgtttttaatatccagggtgggagaggataatattactccaaatatcccagggctatacaccctccgtgtgatattgtttctaatatccagaggaagagaagatgatattactcccaatgtcacagggtgtgtacaggccttctttgatattgttcttaatatccatgagggagaggatgatattactcccaatatcgcaaagactgtacaccctttctgtgatattgcttccaatatccagggagggagaggatattacactcaggatcacagggggtgtacaccccaacctgtgatattgtttctaatatctagggaaaatgagggtgatattactatcaatatcacaggaggtgtacactcccttatgatattgttcctaatatccaggagaatgacaggataatattactcccaatatcgcgggtggtgtctccccccactccgtgatattgttcctaatacccagagggggagagaatcatattactcccaatatcgcaggggatgtacacctacatccggcggagtagaagataatattactcacaatatcgcaagaagtgttcaccttccctgttatattgttgctaatatccagggagtgagaagatgatattactttcaatactgagcgtgtacactacccctgtgatattgtttctcatatccagtagaggagaaaatcatgttactcccaatattgcaggggtgaacacctcctttgtgatatttttcctaatatcaggaaagggagagtatgatattacccttaatattgacaggggtgtacacccccctttgatattgttccaatatccaggggggcagaggataatattattcccaatatcgcagagggtgtacaccccccgtgatattgttcctaatatccagagaaataaaaaatagtattatttccaatatcacagggcgtacattttccctgtaattttgttcctaatatctggggggtggggtggcaggataatattactctcaatattggagagggtgtacacccccctgtgatattgttcctaatattcagggtgggagagaatgatgttactcccaatatctcaggagtcgtatacacccccttgtgatattttttctaatatccaggaggcagaggatgatattgctcccaatatcgcagggggtatacacccgagctgtgatattgtttctaatatgcaatatgggggaaggatgattttactttcaatatcgcagggaatgtacactttccttgtgattttgttcctaatatccaggggtggagaagatgctattactatattactcctcatatcgcaggcggtgtacaactccctgtgatatggttcagaatatccagagtgaaaaaggagggtgacattactcccaatatcgggggggtgtacacccctttgtgatgtggttggtaatatccaggggggcagatgagggtgatatcactccccatatcgtggaaggcgtccacttttttgtgatgtggttctttatatcccgaggggagaaggtgatattactccccatatcgcgaagggcatacacccccctgtgatatagctcataatattccggagagtggaggaagatactatgccctatatcgcgggtggcctacaaccccctatggtttggcttataatatccaggggggagagggtaatattgctccccatattgtggagacgtacagccccctgtgatatggtttgtaatatctttggggggcgagggtgatattactccccatatcgcggggagcatacacccccgtgatctggttcatagtatctcaaaggaagaagttgatgtgtacaacttaagggaaaaagttgaagtgaagtgtacacacgccctgtgacgtggttcataatatccaggcgggggagaggagagtgatatttactccccatatcgcgggtgttgtaaactcccctgtgatatagttcataatatccaggggagagaggagggtgatattgctcctcatatcgcgaagggtgtacaaccccctgtgatatggttcataatatccagaagggtagaggacgatgatattactccacatatcttgggaggtgtgatatggttcgtaatatccagcgatgagagaatgatattactccccatatcgcaaaaggtgtgatagggtttgtaatatcctgagggggagagggtgatattaatccctatattgcagaaggactacaccctcccatgacatggtttgtaatatcccagggggtagagtgtgatattactttccatatcacagggggtgtgatatgattcgtaatattcgaagggggagagggtgacactactctccatatcacggggtgtgtgatatggttcttaatatcccaggggttagaggttgatattaccccctttttggggggtgtgtacaccccctgtgatatggttcgtaatatcccgggggagacagggtgacattattccccatatcgaggggatcgtacaccccctgtggtgtggttcataatatccctagggggagatggtgatattactccccatatcagggggcgtgcactcttctgtggtataattagtaatatccagggggcagaggtcgatattcgtttccatatcatgaagggagtacacttccctgtgatatggttcctaatatccaggggggagagggtgatattattccccatattgcggggggacatacaacccctgtgatatggttcataataaccagaaaagaagagggtgatattaatccccgtattgcagagggcatacaccccccctgtgatatggtttgtaatatctaggggaggaaaaggtgatattactttccatattgctgggtgcagacacccctttatgatatggttcataatatccaagttggagagggtgatattacttcccatatcatgggaggtatacccttccctgtgatatggttcgtaatatccagaaggggagagattgatattactccccatattgtggggggcgtacaccttcctgtgatacggtttgtaatatctaggggatatagtgggtgatattactcaccatatcacgggggttgtaacatggtttgtaatatccaggggaggagagggtaatgttactccccatatctcggggcatgtacaccctcctgtgacatggttcgtaatatccaggtcgggagagggtgatattactcctcatattgccgggggtgtgttatggttcataatatcctggggaaggaggctgctatcactctccacatcttgggggatgtacactctcctgtgatatggttcataatatccagggtgggtgagggtaatattactccccatatcgcgggaagtgtacatacccctgtaatattgtttgtaatagaagagagggtgatattactccccacatcgcgggtggtgcccacccccctgtgatatggtttggaatatccagggggatgaggagggtgatattactccccatatctcggtgggagtacatccctctttgatcaagttcataatatccaaaaggaaacaggagagtgatattactccccatatcgccgggggtgtacacgggagggggagtacacccccggcgatatggtctgtaatatccagggaaggagaggagggtgatattactcaccatatcgcaggtggtctacatttacctgtgaaacagtttgtaatatccagggggggaaatgagaatgattttttttttttgagtctcactgtgtcacccaggttggagtgcagtggcacgatcttggctcactgcaacccccgcctcctggactcaagcaattctcctctcccagcctcctgaatagctgggactacaggcgcaccccacaacgtctggctaatttttgtatttttattagagacggggtttcaccatattggccaggctgatctcgaactcctgaccctgtgatccatccgcctcggcctccaaaagtgctgagattacagatgtgagccaccacgcatggcccaaggagaacgatattactccccatatcccagggggtgtatatccccctgtgatatggttcagaatatccggaaggaaagacagggatattacttcccatatcgcaaggggtgtgacatggttcgtaatatcccatgggggagagggtaatattactcttcgtattgtgaagggcatacactcccctgtgatacagttcataatattccggggagtagaggaagatattatgctccatatcgcgggtggcataagccccctgtggtttggttcataatatccagggaggagagggtaatattactccccatattgtggggacgtacaccctcctgtgatatggtttgtaatatcccagaggggagagagtgatattactccccatattgcagggacatacacccccctgtgatatggttcaaaatgtcttttttttttgaaggactggttctttatttcaaaaagacacttgtcaatattcattatcaaaacagttgcactattgatttctctttctcccaatcggccccaagtagaccacatcaaaggagagtacatattaagccaataagctgtaggatgtacacctaacagacctcctagaaaccttaccagaaaatggggacagggtagggaaagaaactttaaaagatcaacaaactgccagcccacggactgcaggggctgtcacagccagatggggtggccagggtgccacaaacccaaagaagcaaagtttcaaaataatataaaatttaaaaagttttgtacataagctattcaagatttctccagcactgactgatacaaagcacaatgagatggcacttgtagagacagcagcttcaaactcagaaaagggtaatgagatgagtttcacatggctaaatcagtggcaaaaacacaatcttctttctttctttctttctttcaaggaggcaagaaaagcaattaagtgctcacctcaacataaggggaacatgatccattctgtaagcagttgggagggggtagagatggaacaaaattttggtctcagaggtcttgccatcttaatttggtcacttctaatgaaaaaaataaaaaatagaaataacattatccaaaggtatcttaaagctgaaaacttgaacagcacattttttgttgttgttgtttggctaactcctcctggaaccacctttctggcttagctagtactttgtacagagcaatgaggcttcccatagtggagtctccctgggctctgtttggctctcagcaaggcaggcctataccttttcctctcctccatggagagaggaatatgcattaaggtgaaaaatcaccttccaaaagtgagaaagggattcgatcgctgcttcagggctgtggtattatatggaatgttttacaaaaggttgctacaaaacaacaaaagaggtaattacaaaatgtgtacatcacaacatactttttaaagacattatgcattgtgctcacattcccttaaatgttgtttccaaaggtgctcagcctctagcccagctggaatctccgggaagaggcggacagtttggtgaaaaagacacagggaaggagcgggcggcggaaggagggggcggcgaaaggagaaagcagccttccagttaaagatcagccctcaattaaaggtcagcttcgggcaggctggcctcaggcggagtctggttcagagggaggagcagcagcagggtgagactgaggcgttctacatctcattcaggtcaagcagagtctggtccagcatcctttgtgtacagaggtgctcccctttggtgcatttcagtttatcttccaagtcatcaattgtcttttccagcttggctaccgatctctcagcaaactcagcatgggtctccgcctcctttattttatcagtaagaatcttgatctcttcctcatatttgtcttctttttgagagtacttttcttcagcagcactcagacacttcaggttctggtccatcagtctaatctgctcatccatctctcggcaaagggattctgccagctcagctcgttcctctgtgcgttccaagtctccttcaatgatcaccaacttacgagccacctcttcatacttcctatctgcctcttctgcaatgtgcttagcttctctgagttggatttcctggagttccatcttttcttcatcttttaaggcccggttttcaataaccttcttacctctctcactctcatcagcagctttttccgcttcttccagcttttgcagggcagtagccaggtgctcctgagcacggtccagctcctcttcaaccagctggatcccacgttcaaggaggccacctcagcctcagcctgttcccgggcccacctttctccctcaacttctcgctggaggcgctcagctcgctcctctgcatcatctgcctgctgctgcagaacctggatcttgcgcttcaccgcctcgatggtggtgatcccagccatggtgcccacccagctactgctagagctccggttcctgcctcctccgatcggcgttgcagcctcctctcacccttacttccgcctcggttcaaaatatcttaagggaaggagttgatattactccccacatcacgggaagtttacatcccctggtgatatggtttgtaatatcccagggtggatagggtgatattactctccatatcgcgaaggagtactcccccctgtgatatggttcataatatccttggggggagagtgtgatattactccccatatcgcgagggccatatactcctttgtgacatggttcgaaatatcccggtgggggagggggtagagggtaatattactccccatacagcgaagagcatacgcccttctgtggcaaggttagtaatacttcagggaaaagagtgcaatattacttttcatattgcagggaacatacactcccctgtgacatggttcgtaatatcccgggggctgagagggtgatatttctccccatatcaccgggggcctacacctgggtgtgatatggctcataatatacagggagggagagggtgatattactccacataccgagtgaggggttacacaccctcgtgacatgttcgaaataccccaaggaggagacaatgatattactttccctgtcgcgggggctacaccctcccagtgatatggttcacaatatcccggggtggagagggtgatattactccctatatcaccggggggtgtacacttccctgggaaatggtttacagtatccccggggggagagggtactattactccccatatcacgttacatatcagggtacacccccacgtgatatggtttgtaacatcccaggaggaagaaaatgatattactccccatatcgcggtggcatacacccctccccgttaaatggttcataatatcttggggtggagagggtgatattactccccatatcacgtggggcatacaccccactatgatatggttcataatatcccggaggggagagggagatattactctccatgtcgcggggggcatatacacccctgtgatatggtttgtgatatcccgggggcggagagggagatattactctccatatcgtggggtcgtacacttttctgtgatatgattcgtaatatccagacggggagagggtgatattacttcccatattgcgggggcgtacacccctctgtgatatggttcataatatcccgaagaaaagagggtgatattactcctcatatcgcggggaacacacaccaccctgtgatatggtttgtaatattcagcgggggagagagtaatattactccctgtatctcggatggcgtacactcccctgtgatatggttcataatatccagaagaaaagagggtgatattactccccatattccagggaatgtacaccaccctttgaatatggttcgtaatatccaggaggggagagggtaatattgctcccaatatcgaaggaggtgttatacggttagtaatatccagagaaggagagggtgacattactccccacatcgtggtgggtgtgcacccacctgtgatatggttcataatattcaggttaagagaggtgatattgctttccatatcgccaagggtgtacactcccgtgaaatacagttcgtaatatccaaaaggggagagggtgatattactcccatatcgtggggggtgtacacccctctgtgatatggttcataatatccagggtggaataaggtggtattactccctgtatctcggggcatgtacatcgcctgtgatatgattcataatatccagaagaagagagggtgatattaatctccatattgctgggggtgtacaaccccctgttgtatggtttgttacactgagttggggagagggttacattactctcaatatcgagtggggcatacacacttatgtgatatggttcataatatcccagggaggagagggtgatattactccccatatcgcgggaggcatacaccccaatgtgatatggtttgtaatatctacatttttttttttgagacgaagtctcgctcttgtcccccaggctggagtatgatggccggatctcggctcactgcaacctcagcctcccgggttcaagcgattctcctgccttggtcccccaagaagttgggattacaggcgcacaccaccacgcccggctactttttgtatttttagtagagaaggggtttcaccatgttggccaggctggtctagaactcctgacctcagatgatccacctgcctcggcctcccaaagtgctgggattacaggcgtgagccactgcacctggcctggtttgtaatatctatgaagggggaaggtgatattactttccatatcacgggaggcgtacaccacgatgtgatatggtttgtaatatccagggggtatactgggtgatattactccccatatcgcggggagtgtatacccttttgtgatatggttcctaatattaagctgaggagaaggtaatattactccccatatcgcaggggtttttatatggttcataatattcaggaagagagagggtgacattactctccatatcacggggtgtgtactcccccatgtgatatggtttgtaatatccagggaaggagaggttaatattactccccatatcgcagggggtgtacacctctctgtggtttgtaatatccaaagggaagaggatgatattatcttcaatatcttggggggatacagtccccagtgatattgttcataatatccagagggggaggggatgatattactcccaatattgcaggtggtgtacaaccccctgtgatattctttataatatagagggggatgatgatattactcccaatatagtaaacaacctgtgtgtacaccccctgtgatattgtttataatatccaagggtggaaaggatgatattactcctcatatcgcagggggtgtatacccctctgtgacattgttcctaatattcaggggaggagaagatgatactactcctcatatcacaggggatgtacacccccctgtgatacttttggtaatatccaggggaggagaaaattatattattccccatgtcacagagggtgtacaccccgctgtgatagtgttcataatatccaggtgaaaagaggatgatattactccgaatatctcaggaagtgtacacccttctgtgatattgttcataatatccaaaggtggagaggaggatactactccccatatcgcagtgggtgtacacccccctgtgatatggttcataatatccaatgtaggagaggatgatattactttccatatcgcggagagtgtacatccccctgttatattgtttgtaatattcagggagaaagaggatactactactccccatatcacacggggtgtatattcccctgtgatatggttcctgatatccaagagatattataatcctctcttggattatgctacctctcatatcgcatggggtgtacacacactttgtgatatcgtttgtcatatccaaggagggagaggattatattaatcccaagatcacggggggtgtacaccctcctgtgatattgtttgtaatattaaggggggagaggataatattactcccaatataattaacaccctgtgtgtactcctccttgtaatattgttcataatatccaatgggggagacgatgatattactttcaatatcgcagaggatgtacatccctttgtaacaatgtttgtaatataaaaggcaagagaggatgatactacttccaaaattgcaggacatgtacaccccccggtgatattgttcctaatatccagtggggaagaggatgatagtagtcccaatatcgcaaagggtgtacacaccccctgggatattgttcctaatataaaaggaggagaggatgctattattcccaatatcacagaaggtgtaaaatcccctgtgatattgttcgtaatattcaggaggggagaggattatattactcccaatatcacagggtgtgtacacagggaggggcaagggccagaagcgggcgggaatccccatgtttgggcggacccagtttctaatggccagcatttgccaatcaaagcttaccagagaactctaaaagccagggctttcctgctagacaagactcatttctggaactgctttaaaaagaaacaaaacttcccaaggaccccttttcctctctgtctgcctaaaataatgttttaaaaactcctaaagcagctgaattcagcccccttcctgggggaatgtatagacggaactcccacctttcccggcatcccaaggccagagtatgtgaaactcctgggtctctatgtgtgtctgagcggctgctctgccaacactccacacagccctgtgtcctggacccaaggcccttatgacctgagctcaagaggggatctcctgatccatgggttgcaaagatccatgggagaagcatggtttctggggcggggtcacacgctcagtcactgtttccctcggatgccggagatggttcctttggctctctgccaatacagggtgaatcatcatccatccctcttttctttgttctcccgggtcaagttgtttgcctagtcagtcccaatgtgagaacctgaatatttcagttgacgcgctgacttcaaaatccccgggcttcgggaggcggagcttgcagtgagccgagatcccgccactgcactccagcctgggcgacagagcgagactccgtctcaaaaaaaaaaaaaaaaaaaaaaaaaaaaaagtccccgggcttttcttttcactcagtggaaggcagctgcttctaattggccatcttggcccgcccccaccacgtgaccttctgtaaaatgcctccactctccaggaacgctctcattatataactttgcctgaaaccaacagcacgctcattgcacatatcatgggctcatttatttcacttataaagaacctggccaaggaagagatagtgcctaaagtggccagtattctgaccgatatgttagaaaaatggtgtgccgaccaattcatgacatgtgtcccaaaactagcaacggaaattgtattcgccgtgttgaggtctctaatccagatgatgctcatctatgtactggaaaaggcagagtcctttcctgacaagctgctgaaactcttcagaaacatctcatatttcctgaagaagatgatgtctggacaagcagcacaggtcgttcagatttaactttctattcatatatccagcacgatattcgcacaattgtcacgaaaccttaccagttgatgagtcctgcacatttcctttaatttcaggaggaagagggtaatccggatgagttttctgacctactctgctgctgtgattaaacaaccaccaggaaattttgacgacactgttctcctgagctcctccctttcctccgggaacaaaacaattgaatttacaaaaataaagtgttatttgactggagtgaggtctcatgtctgcttatgcggtggctcgctgctcagaacagggtgagtctctgggttgtgtgctgaggaggggaggctctcaatctggagaaaacccactgcaggggacacctccatggggtctgagggactgaggatgaggagccggactgggtctagggaaggaggaggtttcagagggtgaaattctggcactaaagcctgggggtgtttgggaacttcctccttccgaagaagtttcagggagggataaagacaaaccctgggctccttgaggggcccttactaatttgagaggactctatcgggaaggagagtgacaatggcctccttgaggactgaggcccctgaataaatgaggcccagatacagtccatgggggatgagaccttcaagggtcacattttggttgggacagaggaaaagtgcagctctgcagccgcagaggaaaacccggcagtgtgaaagcgaccttggaggggccctgtgcgctctgaatgcgtctgagcccccatcccctgtccccgcctctctttctggattcttccagctcggctgtctccgccatcttctgagcgctccaccctgacttattcaagtttcccttctgccttccaagtactccaaaatctttcagatctgtgtccctacccctgtttttagcatgtgttggggctccaggtccctgaaggtttctggcctgaaatccacctccccagcggagtggactgcgttctagagactccacactccgcgaggttcccaggcccctgagggacaaccgagtggcctgcgcacttcagggctccacactcggcaaggtctttcaagcccttggggtccccttcttagttttttccacctttctgggctgcagtcactccataaatgctgggatctgatccccacccccactctcgtttcctcaattctgcgggctacacgctctggcaaggtcctccgggccctggatcccctccctctccctatgcccacgctcctagtcagcccttctggggtccactattttcaggaactaaccgttctcatggagccttgctaaccggaaagctgtgtggaagaaaggctttgaggatagaggtggagatttggctcttccatagtgccactcacccaccccaccatgctgccactgccagacccggacccctgtttcagaacaagtgaccagattcgctcctggacagccctggacactggccttttctctgaaaactactcaccctttctctagtccccacttcatgccagcctcataccctcttccttcccccacgctggcttccgggatcctcctctgctcagacaacctcttctgtgtcccacccccgtttttagaatgctttggggcaccaggttgggggaaggtttctggcctgatatccatctctttccaaactcccttcttcccttgaaaggcttcttgccttcagccccacttctggctccgaggtttcaggacaccctcctcttcatcctcattcttttgaccaccagctttttaggaattcgaacgtccctctcatcttcgtgaatcctgtccaggcatttgttgaccccttcatctgatacccctgacctcacattgccaaaagtctacccctacccagtacactggaattagacaaaatcccaggagttttacctcaactctgagtgtgcccacaggagctctccctgaagccacgtccttttaagcagggtctagggttcctcccttgtcttaatgaactctttgtcacacggaggacgttatggagcccttatgatctttcactgcctttctgcccagcgttttgtctttccatggacatttataatattttccatggacattttgttctctcaatgtccacccctaatttccaacatcccaaagattctcatgtgtttcctgaaagccatttacaggaatggctgtgcccagacccccttccccaggatcctccttcacacctggtaggtgcctctcctagagagatttgcactcagttgtcgtgcagtcacatggcccagatggttgttaatcacccccttcctggcaacagctagcagccagggaatcactggcacagaaacctcagggtgaccaagatgaggccacctctgtgctgaaggctgtgctccagagcctgcttgggatcaggcttaagcaggtcttcagccagacctgatgttacctggtttccttgagctgccctgcctgagctatcgggagcactccctcaatgcacatcttgattccctatctcatgctctgcttctagaaaccatgagctatcaattgctactggcaatggtcctgggaagtcaaccctaagtatggattctggggttggatgactccccacaggacttcagtgagcaacaatcactgctggcagttggaggacagagtcgctagggcatgtgaccactgtgaaaccaccgatgtttcacctggggtaattttggatgaactacggtagaagcactgaaggtacattgcttttggtttggaagattgtaggtaaataatagcgatatgaatgtggaattggatggctgcaaacgagtgccattgatgcattgaaagaggaaaagtcaggctgtcacctgtcactcagcaatttaaagtgtgagagttgggactagatgtggtggctcacatctataatccagagattcgggggaagcttgaagaggtaggatcttttgagtccaggagttccagaccagcctggacaccagagcaagacctcatctctacaacaaaattttcttaaaaattagatgggcttggtggcacgcacctgtacttgtagatctagctaatggggagcatgagataaaaaaatcacctgagtcagggacttaggggttacaatgaggtatgattgtgccagtgcacacactcccacctggccaacagagtgagattctgcttccaaaaaaataagaaataaatcaggtttgagagttggaaagcatcatcttctcctagagccaaaggacatgtacaactgagacccaggaacaaagcttcatcacaaagagaccatcatcagtggagccgggagatgcattccccctcaccctgccttgaggaggcagtggagtcatctgtctgggatcctttctgacccagccctatttgtttgtctctttggcttctttggatttgtatattttagctgttataacactgtaaaacaaacagagtgatttttttgagttgtgtgaatgatgctagctccatagtcaccctgagagtgatgggaacttttgaatttgtggcaagttggagggtagtgtaagtgacctgagattgccaaattggggctagcactggatgtgaggttaggctagtggaaaaatatgcccagaaccagaggagtgtgggctcactgcaggtggttaggctcagatccaaattgtacagatggatagctttggggtaaagaataacatagttgagaagtgcatgtgttagtctgttcatgcactgctataaagaattacctgagactgggtaattatttataaaactcaggtttaattgggtcatggttccacaggctgtacaaaaagtatgatgctggccatcagctcaacttctggggaggccccagaatagttagagtcatggcaaaaagtacaagggaagcaggctcatcttccacggccagagctggagcaagtggtaggagaggtgatacacactttcaaacaagtaggtcttttgagaactccatcaccggacagcacctatgggatggtgctaaattattcatgaaatatccgcctccataatccactcaactgtcaccagcgcagccagccccacctccaacagtggggattacaattccatatgaggtgtgggtggggacacagctccaacctcaatcagtgggcatcctggattgggtctactatagaaggagaaccaggagctgactatgatcttgaaccctacccatgatggccgggcggggtgactcatgcctgtaaccccagcactttgggaggctgaggtgggtggatcgcctgaagtcaggagttagagaccagcctggccaacatggtgaaaacctgtctctactaaaaatacaaaaaattagaccggcgttgtgctggatgcctgtaatcacaccactacgctccagcatgggaaaaaataccaaaacttcgtctcaaaaaaaaaaaaaaaaaaaaaaaaaaaaagactgcccatgaccactgcaccagtgagagggacaccagcatcactgagatgcaagggctggacattcttcataggtcagagctcaaagcaggggacactgatacagagatgggctccatccatagcaccaaagtggtgagaggatgtgggaatggcagaggccagcactttgccatcaatgcaagggggtataaggaggtgacaccagtgccagagtacatcacggggggactgccctacaatatctaggacttacctcttagagcgtgtttcattagcgacaacagatataaatggcagacaggtgtgtccctgcattaacaggaaatagaaatcatcaagaggaacagaaggcagatgtcagcagccccttagaaagtcatcatccttcatacagttaaaatctgagacagttctcacacgagaaggcctaactcaaaaagaggctgggttctcatgaggcaggtttatgcaaaaccaaggaaggtgtacaagtttggaattctccagtttcccttggaaaagacctacagtcatttgcttaggtaactgagcactgaacaaaggtgagtattgttgtcttttagaagctcttggccaagaaggccttgttggcataaaacccatggtttggaaacatcaccatgacccctgttagagtaatggcctaagggtgggggtcaggaaattgatgtattccttgccaacttctgcctctaagtgagtgaactctgtttgtgaacctctctcctctgtggttatgttcctaggctctcatgtataatcaggagtcatagacttagaaacaggaaaaatacttacagtgtttttgtggcctgtgagctatgacttataattttaggaaaaaaacaattgcaaatggaaagcctaagtctatcaatgctcatccaagacaacataatcaataaaaaccaatatcaaatctcaaggcaaattatttcctgtatatagatggcagagatgagcaccaccatcaaaaactcaaggaccagtgctgtgggtccagtcatctgtttcatggaattcaccagtctggtatcttcaaaatccagaaggatgatggcagatggcaggaaagtaatgcaaacgtcatcaggtgtgaccccactgtagcagctgtgatggatgttttctctcaccatagcaataaataacacaacctcggtcacactgtatgcattgttggtctgcaaaatccatgttttgcaaaactcttcaggaaggtggatctgtaatattggcattgacatgagaacaacagcagtatttattcacaatctcaagctctctgtcttcccgtctctctcattagccatccaagtagtcctgaggaaccaagcccatcagaacattctgcaacataatacacagctccattctccattcaaattttgttgttgttgttgttgttgatgagacaacatcttactccatcagccaggctgacgtacagtggggctatctgggctgactgtagtcttgagcttccaggctcaaggcatcctctcacctcagcctcctaagtggcttgaactacagacacacagcgacatgctgggctagtttttgtatattttgtagagacgtgctctcaccatgttattcaggctggactcaaactcctgagcgtaagtgatccaagcaccttggcctcaaagtgctgagattacaagcctgagccactgcacccagcccaatctccattctactgataacaatgtcattaccaggtctgatggacaggaaatggtaaggtttctgaaaacctaaggatcacacagcgagttccaaaggctgaaagtgcatacctgtcgacactgataccaatgacatccaatggtgagaatgacattccttgtagtcctagctctgctcataacaaatctatactgaagtgtaagagtttgatggtcatggggattttccatgtctctgcctttcagcgatgtgccatatctgtgaagtgttcagaaatgcaacagcctgaggcatgctgggcatatcctctaataaaaaggaaaatgccattttatggtcctgtatttctacaagttggaacacatgggcctgtgatccagatgggggaaatgggaatattcccactcattcaccttcatccacgaagcccatttgaaagctttgggcttcccatccttgtagattttagtgttgtgggctgggtgcagtggctttcacctgtactgccaacactttgggaggcctagacaggtgaatccactgaggccaaaagttcgagaccagcctggccaagatggtgaaaccccgtccctactaaaaatacaaaaattagcaaggtattggggccagcacctgtaatcccagctgctcgggaggctgaggctggagaatcgcttgaacccaaaaggcagagactgcagtgacccgatcctgcctttgcactccacctgggcaagcagaacaaaacttctgtcttgaaaaaaaaaacaaaaaacgaacaaaaaagatgttagagttctgggtttagaggtctataccccagaaagagaatggtttcaacaagggacaaagaagttgctttaaacgttgacttgccatttcttttcagtgtgtttgttctcttgcgtcaagagaccaccagaaaagtggtgcaattactctcctgtcaagaatcattgactatcatctgcaagagggtcagatcctggtatataattagggcagaaatacttagtctgagaagggtatgacatccagaggccctattaatgatgtccttttctccatgcctgactctgaccccatgtgctggactgcccctgtgtggatggcctcatggcctgctcggactctgaggtcccaccccaagtggcacctccatggagggctctactcttgtatgggctctgacactcacactgagacactctcccatggacacctcttcacccacttggggtctgaaactgggctactccatccctccctaacctggaacagagagctttcactgctattacacaagtcatagaggctaactcctcatttttccaagctaattattgaaacattagtcctgggttgataagacaagataagttaacttttcataaatttgcttatcaagttttgaataaattcaaataaattcaccttccccacacaccttagttgtcgacatcacacgcgcacccatactcacagggtgagcacgaaggcttcactgtcagtggagaaagtggcaaaacccttctgtgcctcatcctggtctagacctggccctcatcctttcccactcttcccctcactcccttggattcatccacactggcctcctgcctgctgctccacctccctgcgaagctcacccctgcctcagggcctttgcacgtgcagtggcttcaagccatatcctcttcacccagatctcccagatctcctgaatgatcttcttttatcattcaggtctcagcttgcatgtaatcttctcagtgaggattacccaaaccacatagttcattcattcattcaaatattcattcaatggcatattgacaaagcagctacttcatgccaggccttgggccaggtgttatggatatggcaacaaacaaaacaagagttttctgctctcaaatttttacccacttaaaggagatatcatacatcatctgtaaataaatacatcatctgtaaataatgatgtaaataaatacatcatctgtaaatctgtaaataatgatgtaaataaatacatcatctgtaaataaataaagtataataaaagaaaatagtaggtttttttggttggaggtgaccgtgaagtttgcaaataccatcttacaacacattattttattttatttcatttcatttttaattttattattattatactttaagttttagggtacatgtgcacaacgtgcagatttgttacatatgtatacatgtgtgaagttggtgtgctgcacccattaactcgtcatttagcattaggtatatctcctaatgctatccttcccccctcccccaccccacaacagtccccggtgtgtgatgttccccttcctgtgtccatgtgttctcattgttcagttcccccctatgagtgagaacatgcggtatttggttttttgtccttgtgatagtttgctgagaatgatggtttccagcttcatccatgtccctacaaaggacacgaactcatcattttttatggctgcatagtattccatggtgtatatgtgccacattttcttcatccagtctatcattgttggatatttgggttggttccaagtctttgctattgtgaagagtgccgcaataaacatacgtgtgcgtgtgtctttatagcagcatgatttataatcctttgggtatatacccagtaatgggatggctgggtcaaatggtatttctagctctagatcactgaggaatcgccacactgacttccacagtggttgaactagtttacagtcccaccaacagtgtaaaagtgttcctatttctccacatcctctccagcacctgttgtttcctgactttttaatgatcgccattctaactggtgtgagatggtatctcactgtggctttgatttgcatttctctgatggccagtgatgatgagcatttcttcatgtgttttttggctgcataaatgtcttcttttgagaaatgtctgttcatatccttcacccactttttgatggggttgtttgtttttttcttgtaaatttgtttgagttcattgtagattctggatattagccctttgtcagatgagtaggttgtgaaaattttctcccattctgcaggttacctgttcactctgatggtagtttcttttgctgtgcagaagctctttagtttaattagatcccatttgtcaattttggcttttgttgccattgcttttggtgttttagacatgaagtccttgcccgtgcctatgacctgaatggaaatgcctgggttttcttctagggtttttatggtttgaggtctaacatgtaagtctttaatccatcttgaattaatttttgtataaggtgtaaggaagggatccagtttcacctttctacatatggctagcctgttttcccagaaccatttattaaatagggaatcctttccccacttcttgtttttgtcaggtgtgtcaaagatcagatagttgtagatatgtgacattatttctgaggactctgttctgttgcattggtctatatctctgttttggtaccagtaccatgctgttttggttactgtagccttgtagtatagtttgaagtcaggtagcatgatgcctccagctttgctcttttggcttaggattgactttgcaatgcggggtcttttttggttccatgtgaactttaaagtagttttttccaattctgtgaagaaagtcattggtagcttgatggggatggcattgaatctataaattaccttgggcagtatggccattttcacgatattgattcttcctacccatgagcatggaatgttcttccatttgtttgtatcctcttttatttcattgagcagtggttttagttctccttgaagaggtccttcacatcccttgtaagttgggttcctaggtattttattccctttgaagcaattgtgaatgggagttcactcatgatttggctctctgtttgtctgttattggtgtataagaatgcttgtgatttttgtacattgattttgtatcctgagactttgctgaagttgcttatcagcttaaggagattttgggctgagacaatgggttttctagatatacaatcatgtcgtctgcaaacagggacaatttgacttcctcttttcctaattgaataccctttatttccttctcctgcctaattgccctggccagaacttccaacactatgttgaataggagtggtgagagagggcatccctgtcttgtgccagttttcaaagggaatgcttccagtttttgcccattcagtatgatattggctgtgggtttgtcatagatagctcttattattttgagatatgtcccatcaatacctaattattgagagttttcagcatgaagggttgttgaattttgtcaaaggccttttctgcatctattgagataatcatgtggtttttgtctttgggtctgtttatatgctggattacatttattgatttgcatatattgaaccagccttgcatcccagggatgaagcccacttgatcatggtggataagctttttgatgtgctgctggattcggtttgccagtattttactgaggacttttgcatcaatgttcatcaaggatattggtctaaaattctcttttttggttgtgtctctgcctggctttggtatcaggatgatgctggcctcataaaatgagttagggaggattccctctttttctattgattggaatagtttcaggaggaatggtaccagttcctccttgtacctctggtagaattgggctgtgaatccatctggtcctggactgtttttggttggtaagctattgattattgccacaatttcagatcctgttattgctctattcagagattcaacttcttcctggtttagtcttgggaaggtgtatgtgtccaggaatttatccatttcttctagattttctagtttatttgcgtagaggtgtttgtagtattctctgatggtagtttgtatttctgtgggatcagtggtgatatcacctttatcattttttattgcatctatttgattcttctctctttttttctttattagtcttgctaccggtctatcaattttgttgatccttttaaaaaaccagctcctggattcattaattttttgaagggttttttgtgtctctatttccttcagttctgctctgattttagttatttcttgccttctgctagcttttgaatgtgtttgctcttgcttttctagttcttttaattgtgatgttagggtgtcaattttggatctttcctgctttctcttgtgggcatttagtgttataaatttccctctacacactgctttgaatgtgtcccagagattgtggtatgttgtgtcttttttctcgttggtttcaaagaacatctttatttctgccttcattttgttatgtacccagtagtcattcaggagcaggttgttcagtttccatgtagttgagcggttttgagtgagtttcttaatcctgagttctagtttgattgcactgtggtctgagagacagtttgttataatttctgttcttttacatttgctgaggagagctttacttccaagtatgtggtcaattttggaataggtgtggtgtgatgctgaaaaaaatgtatattctgttgatttggggtggagagttctgtagatgtctattaggtccgcttggtgcagagctgagttcaaatcctgggtatccttgttaactttctgtctcattgatctgtctaatgttgacagtggggtgttaaagtctcccattattattgtgtgggagtctaagtctctttgtaggtcactcaggacttgctttatgaatctgggtgctcctgtattgggtgcatatatatttaggatagttagctcttcttgttgaattgatccctttaccattatgtaatggccttttttgtctcttacgatatttgttggtttaaagcctgttttatcagagactaggattgcaacacctgcctttttttgttttccattttcttggtagatcttcctccatccctttattttgagcttatgtgtgtctctgcacgtgagatgggtttcctgaatacagcacactgatgggtcttgactctttatccaatttgccagtctgtgtcttttaattggagcatttagcccatttacatttaaggttaatattgttatgtgtgaatttgatcctgtcgttatgatgttagctggttattttgctcattggttgatgcggtttcttcctagccttgatggtctttacaatttggcatgtttttgcagtggctggtactgactgttcctttccatgtttagcgcttccttcaggagctcttttagggcaggtctggtggtgacaaaatccctcagcatttgcttgtctgtaaaggattttatttctccttcacttatgaagcttagtttggctggatatgaaattctgggttgaaaattcttttctttaagaatgttgaatattggcccccactgtcttctggcttctagagtttctgccaagagatcagccgttagtctgatgggcttccctttgtgggtaacccgacctttctctctggctgcccttaacattttttccttcatttcaactttggtgaatctgacaattatgtgtcttggagttgctcttcttgaggagtatctttgtggcattctctgtatttcctgaatttgaatgttggcctgccttgctaggttgcagaagttctcctgggtaatatcctgaagagtgttttccagcttggttccattctccccatcactttcaggtacactaatcaaacgtagatttaatcttttcacatagttccatatttcttggaggctttgtttgtttctttttactctctttcctctaaacttctcttctcacttcatttcattaatttgatcttcattcacttatatactttcttccacttcatcaaatcggctactgaaggtattgcatgcatcatgtagttctcatgccatggttttcagctctatcaggtcatttaaggtcttctgtacattgttttctctacttagccattcgtctaatcttttttcaaggtttttagcttccttgtgatgggtttgaacatcccctttagctcagagatgtttgttattactgaccttctgaagcctgcttctgtcaacttgtcaaagtcattctccatccagctttgttccattgctggtgaggagctgcgatcctttggaggagaagaggtgctctggtttatagaattttcagcttttctgctctggtttctccccatctttgtggttttatctacctttggtctttgataatggtgacctagagatggggttttggtgtggatgtcctttttgttgatgttgatgctgttcctttctgtttgttagttttccttcgaacagtcaggttcctcagctgcaggtctgttggagtttgccggaggtccactccagaccctgtttgcctgggtatcaccagcggaggctgcagaatagcaaatattgcacaacagcaaatattgctgcctgatccttcctctggaagcttcgtctcaaaggggtgcctggctgtatgaggtgtcagttggcccctactgggaggtgtctcccagttaggctagatgggggttagggacccacttgagaaggcagcctgtccattcacagagctcaaacactatgctaggagagccactgctctcttcagtgctgtcagatggggatgtttaagtctgcagaaatttctgctgccttttattcagctatgccctgcccctacagatggagtctacagaggcaggcaggcctcattgagctgcggtgggctcctcccagttcgagcttccagaccactttgtttacctactgaagcctcagaaatggtgaacacccctcccccacccagtctgccgccttgcagttccatctcagactgctgtgctagcagtgagcgaggctccatgggcgtgggacccactgagccaggcacaggatataatctcctggtgtgccatttgctaagaccattggaaaagcacagtattaaggtgggagtgtcccaattttcccagtacagtctgtcacgggttccctcatctaggaaaggtaaatcccctaaccccttgtgcttcccggtgacgcaatgccccaccctgcttcagctagccctccatgggctgcatccactgtccaaccagcccaatgagatgaacaaggtacctcagttggaaatgcagaaatcacccatcttctgtgtggatcaggctgggagctgcagaccggagttgctcctattcggccatcttggaatggcaatctatgtttgctttttacatttgaaaaaactggtgtcacgtacctaggtattaatcattgtggtatcctcttgccgatttacctctttatcattaactagtgaccctccttgtcttttgttgttacagtctgtgattttagtctattttatctaatatgagaatagctactctggcacttttttggtttccagcttcatgaaatatccttttccatttccctgttttcatttccctttcggtgtctctatagatgaagttgatttctttaaggcaccataagttgggtcttatttctttatccatttgaccatttagagaatttagaacactgtcagtgttattattcataagtaaaaacttaagagtgggtgtagtggtgtacatctgtatttcctgcactttgagagactgaggcgagctgatctcctggggtcaggagtttgagaccggcctggtcaacatgatgaaaccctgtctctactaaaaatacaaaaattagccaagcatgctggcatgtgcctgtaatccaatttacttgggaggctgaggcaggagaagcttgaacctgggagacaaatgttgcagtgagctgagatcacacagagaagtcatctccactctcctcatcagaacctcttgttcacagcatttgtgagcacaaatcaatgatggttattctttcctactaattagggatattttattacacagcaatagcctccagcaaagggaaccatcatacatgattcctacaagttgacagggctggaattatcactgaaaaactaaggtggctatacttgattcccaatgtccaatttttcatgaatagagaaatttatcctttttccccccagccagaaaccaagttttgctcttacgcccaggctggaatcaagtggcacaatctcagctcactgcaacctctgccccccagcttcaagaaattcaccttttgaacaaggagatattaaggatacactatgtgtatgctaccggtggttgcaggagactcagaaaagagagaaacagtcactggcctcgtgcaactgatattctcgggaggagagaaaggcaatcaagaaagaaacatgctgtatttcagacagctgtaagtcctccacaagaaaagaaagcaggtgaggaacataggaaatgtgtcaaccataaggttcccgctaattctataagttggtcagggatatcctccaagaataagcagcatctgagcaatcacctgaagggaggaaggaaggaagactgtgagtggtggcttacacctgtaatcccagcactttgggaggccaaggagggcagattgcctgagctcaggagttcacgaccactcagagcaacctgttgatacccaatctctactaaaaacacacaaaaaaattacccgggtgtggtggcacgcacctgtagtcccagcttccatgcccagctgatttctctctctccatatatatatatatatacacatatattgtttttgcagagatagggtctcactgtgtcacccagtcatcaagcaattctcttatactgttttggaaaagcatgggaattacaggtgtgaaataccctgctggtcctgaaaaatgtgatatttgggattctctgcctggcttgttttacccaaaataatgacctccagttccttccaggttgctgcaaaagacatgattttcactgttttataactgaatagtattcctgtatgtatacataccacattttctttatttattcttctgttgattgacatgtagggtgattccatgtctttgctactgtaaataatgctgcagcaaatatttgtgtgcattttgatctattcctttgagtaggtacccagtactgcaactgcaggactgagtagttgttatattttttgttctttcagaaatctccatagtgtttgccataaaatctgcactaatttacattcccaacaacaatgcataagatttccccttttctccacattctcactaacatttgttatgtttttgtctttttcataatacccattctgactggagtaagatatctcattgtggtggttgttgatatttttgagacggggtctcactctgttgccagactggagtgcagtggtgtgatcgtggcttgctgcaacctccacctcccgggttcaagcaattctcctgcctcagcctcccgagtagctgggactacaggcgcgtgccaacaggcctggctcattttttgtatttttagtaaagacagggtttcaccatgttggccaggatgatcacagtctcttgagctcatcatacacctgcctcagcctcccaaagtgttggaattacagtcatgaggcagcgcacccaacctcaatgtggttttaatgaccatttctctgacgattcatggtgtggagaatttctttgaaataccttttggccatttatatgtgctcttttaaaaactgactcctgtccaggtgcggttgagcatgcctgtaaccccagaacttcgggaggctgaggccaatggatcacttgaggcaaagaggcagaaatcagcctggccaacaaggcaaaaccccatctttactaaaaatacaaaaaatcagccacgggctgtgactcgtgcctgtggtgcaagttactcaggaggttaaggcacaggaattgcttgaacccggtaggcacaggtcacagtgagccaagatcatggcactgcactacagcatgggtaatagagaaagacctgtctcataaaaacaaatgaataaataaataagataaaaaataaaaaagtctctttatgtcctttgccgactttttaatgggattctttggagttttctgttgtagttgagatctttgtttactctcggtattagtcttttgtcaaaggaaaagtttacaaataatttcttccgttctgcagtttgtctgctcactctgttgagaggattatttctttggctgtgcagcagctttttgtttcagtaaagcttttgaatttatataattaaaattttcagtttggtttaaatttgcactggtcgatttttggttttgttgcctgtacttttgaagtcatactcttgaactctttactagacaataaccagaagagttttctctagttttcttctcacatttttattatttcagtacatatatttaagtctataattcatcttcaattgatttttgtagaaatagtgagaaataggagtccaggtttattcttctgcaaatgacaattcaattgttccagcaccaattattgaaaagggtgtgctttcctcaacgtatattcttatcagctttgtcaaagatcagttggctataaatgtgtggctttctttctgggctctctagtctgttacatcaatctgtgtgtctatctgtatactactaccatgctgtattggtgatgatggctttgtaatataatttgaagtcaagaaatgtgatgctcccagctttgtttatttgcttcagaaaggctgagtcaacagctgcagagatgaagctgcccctcctcgcagggctccttcccggaaaaagatcatggctcccactgaccatataaccatggctggaactcctgaaattcccaaagggaggccctacccagtgaggggggatgaatgaaggtcctacttaaggaatctgtctggccacaatcaggcacagcagctgtgctgccttgtgggggaccagaccacctggattccctggagcctgcaggctagaatgtctgagtccatggaaacacagaaatggaggccgccctcacctccccagaaaactgtagtctcaggcagtctccagccgattgccactggttggctgctattccaagccagtgggtcttaacttgagaggtgctgtggaagtggggcccacggaatgaggctgcttggctccctggattcagccccttttctaagggaatgtacagatggaactcccgccttgcccagctttccaagtatataaaactcctgagtctctgtgagtgtctgagcgagtgctctggcaacattcgacacggctctgtgtatctgacccaagacccttatggcatgagctaatgggaggatcttctgatccatgcgtggcaaagatgcatgggagaaacatggtttgtgggtaggggttgtgcattcactactgcttctcttggctgtaggtgaaggtttctttggctctgtgctgatactgggtgcaccatcacccaccccctttgtttcttctcctgggtcaagtcatttgcctaatcagtcccaatgtaggaacctggatacttcagttcaaggtgctgaattcaccgtgcttttcattcaggggaagacagctgcttctcattgggcatcttggcctgcccacttcacgtcactttttgtaaaatccacaccactccaggaatatccattacttaacttcgcctgaaataaacagaaggctcattacacttatcatgggctcacttacttcgcctataatgaaggtgccatggaaatgctagtggatgacgtggtccattttcttagggatgagatagaaaaatggtgtatggctttttaatttaattaaaatttttagtttggtttaaatttacattggtctctttttggttttgttgcctgtacttttgaagtcttactcgtgaactctttactggacaatgaccagaagagttttccctaagtttcttctgatattttgaccatttcagtacatacatttcagtctataattcactttaaattgatttttgtaaacatggtaagaaataggagttcagatttattcttccgcatatgataatgcaactgtcccagtaccaattattgaaaagggtgtgctttccctagtgtatattcttgtcagctttgtcaaagatcagttgcctatgaatgtgtggctttcattttggattctctcgtctgttacatcaatctgtgtgtccacatttatacctgtaccatgctgtattggtgactatggctgtgtaatatattttagagttaggaaatgtgatgctcccagctttgttcatttgcttcagctgaaaaggttgagtccacaattacaaagatggcagccgcccatccccggaggacctccaacccagaaagagatcaggcttcccaccaaccctataaccctggctggagttcctgaaattccaacagggaggaccttcccagtgaggagggatgaatcaaggtcaaatttaaagaaacagtctggccactatcaggcacagcagcagtgctgccttgtgggggacccctcctgctccagaccagctgccctccctggagcccgaaggctagattgtctgagtctacggaaacagagacggtggccgccccaaccacccagaactcggtagtctcaggcacttggcttgctatcttgccactgcttggctggtattccaagcccgtgggacttgagaagtgctgtgatgatggggaccacaggatgaggctgtctggctccctgtgatatggctgtgatgagtggaggaacaccagggctcatgtctcacacagaattggagaaaatgacacaaacacatgtacagtggttttatggcgtgcagtttaataggcaagaacgaaggaagagctccccatactgagacagagggaggggggctccaaagccaaaagaggaaacccggagtgctgtggataccaatgagttatatgaagaaactggagggggcggtgtctgatttgcatagggttcaggcgattggttcgaccaggcatgtcatttatgtggcccacggaaaaactggccctcccacctagcctttgaatatgcacgtgccggacaccctgatttcctacactcatggggatatatgggggtggccatatcgccaggcacaggtggggacaagggccagaagagggcgggaatcgctatgtttgggtggacccagtttctaatggccggcatctgcagatcaaggttaccggagaactctaaaagccggggctttcctgctagacaagactcatttctggagctgctttaaaaagaaacaaaacttcccaaggaccccttttcctccctgtctgcccaaaataatttcttaacaactcgtataacacctgaattcagcccccttactgggggaatgtaccaacggaactcccacctttcctggtttctcaaggctagattgtgtaaacctcctgggtctcggtctgtgtctgagcagctgctctgccaacactccacacagccctgtgtactaggcccaaggccgccgtgactcagcccatgggaggatctcctgatttcttggttgcaaagatccatgggagaaaaatggtttctggggcggggtcacacactcatggcttctcttggctgtgcaagaaggttcctttggctctgttccaatatagcgtggttcatcacccacccctgttttctttgttctcctgagtcaagttgtttgcctagtcagtcccaatgtgagaacctgaatatttcagttcacgtgcttatcgtgaaattcactgagactttaattcagtggaaggcagcctcttctaattggccatcttggcccgccccctccacgtcacctcccataaaatggccacgctctccagggacgatgccattatatatctttacgtgaaaccgacagaacacttattacactttttgtgagctcatttacttcacttataatgaacatggccatggaaatgctagtggagaaagtggtcgattttctgatggatgtgataaaaaaatggtttgccgaccaattaatgacatatgtctcaaaactagtaacgagacccttaatcgctgggttgaagtttctaatcaagaagatgctcatctatgtattcaacaaagcagcttcccttgcttctgaaatgcttccaaacaacatctcatatttcctgaagaagataatgcctggacaagcagcacaagtcattcaggtttactttcagctcataaatccagcaggatattcgcacaattgttgggaaaccttatcagttcatgagtcgtgcatgtttcctttaatttcaggaggaagagggtaatctggaagagtttcctgacctactctgctgctgtgattaaacaaccaccaggaaattttgatgacactgttctcctgagctcctccctttcctcggggaagaaaagcattgaaactacaaaaataaagtgttatttggctggagtgaggtctcatgtctgcttatgcggtggctcgctgctcagaacagggtgagtctctgagttgtacgctgaggaggggaggctgtcaatctagaaaaaacccattgcatgggacacctccatggggtctggggggctgaggatgaggagctggactggatctagggaaggaggaggtttcagagggtgaaattctggcagtaaatcctgggggtgtttgaaaacttcctccctcagaaggagaagactcagggaggaataaggacaaaccatgggtcccttgaggggcatttactaacttaagaggactttatcgggaagcagagtgacaatggcctccttgaggactgaggcccctggataaatgaggcccagatccagatccagtccatgggagatgagaccttcaagggacatatttttgttgggacagaggaaaagtgcagctctgcagctgcagaggaagccttggcagtgtgaaagcgaccttggagggggccctgtgcgttctgaatgcttctgaggtccatcccctgtccccgcctctttttctggattttttgggctccatggtctccgccatcttctgagcgctccacgctgccaccttcagttttctcttctgggctccaaatactccaaaatctttcatatctgtgcccctacccctgtttttagcatgtgttgggactccaggtccctgaaggtttctggcctgaaatccacctccccagcggtgtggattctgctctagagaccccgcacttggcaaggttcccaggcccctgggggacaaccgagtggtatgtgcacttcagggctccacactcggcaaggtctttcaagcccttggggttccctcctcagttttcttcacatgtctgggatgtagtcactctataaatgccgggatgtgatccccaccccagtgattttttttagttccatgagtgttgctatctgaatagtcatcctgagagtgatgggaccttttgaatttgcagcaagttttagattagtgtgagtggcctgagatcgcaaaactggggctagcattggatgtgaggttaggctggtggaaaaatttgcccagaacctgaggagtgtgggctcactgcaggtggttaggatcagcacagaattgcaaggatgtatagctttggggtaaagaataacatggttcagaagtacatgtattagtcttttcatgcattgctataaagaattacctgagactgggtaattaattataaaaactcaggtttaattggctcatggttccacaggctgtacaaaaaggatgatgctggccatcagctcaacttctggggaggcgtcagaaaacttagagtcatggcaaaaagcacaagggaatcaggctcatcctccatggccagagctggagctagtggtaggagaggtgctgcacacttttgaacaatcagatctttttagaactctatcaccagacagcacctagaggatggtgctaaattattcatgaaatatccacccatatgatccactcaattctcaccggcccaaccaggaccacctccaccattggggattacaattacacatgagatgtgggtggggacacagatccaaactcgatcagtgggcatcttggactgggtctactatagaagaagaaccaggagctgactatcatccttaagactgcccatgatggccaggcagggtggctcatgcctgtaatcccagcactttgggaagccaaggtgggtgaatcccctgaggtcaggagtttgagaccagcctcgccaacatggtgaaaccctgcctctactaaaaacacaaaaaattagatgggtgttgtgccagacgcctgtaatcacagctactccagaggctgaggcatgagaattgcttgaacctgggaggcggaggtggcggtgagccccaatcgcactgctacactccagcatgggcaacaataccaaaacatcgtctcaaaaaaaaaaaaaaaaaaaaaaaaggctgcccatgaccactgccccagtgagagggacaccagcatggctaagatcaagtgctggacattcttcatgggtcagacattaaagcaggccacactgttacagagatgggctccattcatagcaacaaagtggtgagaagatgtgggaatggcagaggccagcactttgccatcaatgcaaggtgggcataaggagctggcaccagtgccagagtgcatcaggggaggactgctttgcaatatctagcacttacctcttagagtatgtttcattagggacaacagatataaatggcagacaagtgagtcccttcagtaacaggaaatagaaatcatcaagaggaacagaaacagatgtcagcagccctcatataaagtcatcatccttcatccagttaaaacctgagacagttctcacataagaaggtctaattcaaaaagagactgggttctcatgaggcaggttcatgcaaaaccaagggaagtatacaactttgggattctccagcttcccttggaaaagacctacaatcatttgcttaggtaactgagcactgaacaaaggtgagtattgttatctttcagaagctgttggccatgaaggtcttgctggcataaaacccatggttggaaacatcaccatgacccctgttagagtaatggcctaagggcaagggtcaggaaattgatgtattccttgccaacttctgcgagacgagtgttggtccactcatctctttcacggaattcaccagtctggtatcttcaaaatccagaaggatgatggcagatggcaggaaactaatgcaaacaccatcagttgtacctccactgtagcagcagtaatggatgttatctcttcattgtaatatccagggagggagaagatgacattattctcaatattctaaacaccctgtgtgtacagcctctgtgatattttttgtaatatccgtgtgggagagaattatattactcctaatatctcaggggttgtgccccctctgtgacaatgttcctaacacccaggaggggataggatgatatcacttttagcatcacagggggtgtacaccccactgtaatattgttcataatatccgggggggagagaatgatattactcccaatatcgcaaagactgtacaccaacctgtgatattatttgtaatatccataagaggaagaataatattactcccaatgtcacaggaagtgtacacccttctgtgatattgttcaaaagatccagttagggaggggatgatattactctcaatatcttaaacaccctgtaggtaagccctctgtgatattcctcataatatccagagggagaggatgatattactcccaatattgcatgaagtctacaccccacctgtgatattgttcctaatatccaggatgggagaggatgatattactcccaatgtcgcaggggatgtacaccttccctgtaatattgttcgtaatatctagaaaaggagaggataatattactttcaacatcgcagggggtgtacaccttccttgttatattgttgctaatatccagggaaaaagaagatgacattaccaccactattgcagaaggtgtacacccccccttgatatagttcctaatatccagaaaaggagaggagatattactccaaatattgcaagaggtgtacattcccctgtaatatttttcctaacattcaggaagaaagagagtgatattgcccttaatattgaagggagtgtgccccccccgtgatattgtttctaatatccaagaaatgaaaggatgatattactcccaatatcacaggggctgtacagccccctcccatgatattgttcccaacatcggggggggggtgaaatagtattattcccagtatcacaataggtgtacacacctgtcgtgatattgttcctaatacccatgggggaaaggacgatattattcttaatatctcagagggatgtacaccctccctgtgatattgttcctaatatccggggtgggagaggatgatattacccccaaaatctcaaagggtgtacacccctcttgtgatattgttcctaatatccagggtggagaggataatattattcccaatatccaggaaaggaaacgatgatgttactgtgaatattccagggggtgtcctcccctctgtgatattgttcctaatatccaggttggggagattatgatatttctccaaatatcacaaggggtgtacaccaaccctgtgttattgttcctaatatcgatggggggagaggacgatattactcccaatatcacagggggtgtacaccacctttatgatattgttcctaatatccatgaagaaagaggatgatattactttcaatatcgcaggggatgtacactccccctgtgatattgttagtaatacctaggagaagaaagtgtgatattactcccaatatcgcaggggatgtacacgcttcctgtgatattgttcctaatatttagggggaaaggggatgatattactcccaatatcgaatggtgtgtacacccccccgtgattctttttttttttttttttttttttttgagatggagtcttgctctgccgcccagactggcgtgcaatggcgcaatctcggctcactgcaacatttgcctcccaggttcgcacgattctcctgcctcagccttcggagtagctgggattataggcagctgtcaccataccaggctaatttttgtatttttagtagagttggggtttcaccatgttggtcaggctggtcttgaattcctgacctcaaataatccacccaccttggcctcccaaagtcctgggattacaggcataactttccctgtgatattcttcctaatattcaggaagaaagaggatgatattgctcccaatatcgcagagagtgtgcactcctcctgtgatatggttcttaatattcagaggaggagaggatgatattactttctatattgcagaaggtgtacacctccctcgtgatgtctttcctaatatccagtgggggagaggttattagtctcaaaatcacagaaggtgtaaacccccatttgatattgttcctaatattcaggggtggggagagaaaggtattactcctagtatttcagggcatgaacacccccaccgtgatatcattcctaatatccagaaggggaggcaatgatatttctcctaatatcacaaagggtgtacaccccttctgtgatattgtaaatattctgtgtgtacacccccctgtgttatagtctgtaatatccgggtgggggagagggtgatatttctccccatattgtaggggatgtacacccttctgtgatatggttcgttatatccagggaagaaaaaggtaatattgctgcccatattgtggagagtgtacacccccatgtaatatggttcgtaatatccaggagtggagagggtgatactgctccttacatcgaggaaggtgtacaccttattgttatatgattcgcaatatccaggggaggagagagtgatattgctccccatgtcgcagggggtgtaaaccctccgtgatatgattggtaatatccaggaaaggaaagggtgatatttctccccatatcgcgggggacgtacatcctcctgtgatatggttcgtaatatccaggaggaaagaggaaaatattgctcttcataacccgaggggtgtacaacccctgtgatatggttcgtaatacccagaagtgtacacccctctgtgatatggtttgtaatatccagggggttagagggtgatattgctccccatatcgcagtgggggtacacccccctggattggttcataatattcatggggggagaaatttacatttatcctcatatcagggggggtgtacaccccccgtgatatggttcgtaatatccaggggaagaaagggtgatattgctccttatatcgcggaaggatcaccctcccctgtgatatggttcataatacccagacgggaagagggtgatattgttcttcataaagcgaagggtgtacagccccctgtgatatggttcataatatgcaaaaggggagagggtgatattgctccccatatcacggagggtgtactcccttctttgatatggttcgtaatatccaggggtgtagatggtgatatagctcgccctattggggagggtgttcacccctctgtgatattgttcgtaatgtccagggaaagagaggatgatattactcccaatatcgcagaaggtttacaccactctgtgatattgttcataatatccagggaaggagaagacgatattactcccaatatggcagggggtgtagaactcctgtgatattgtttgtaatatccaggcaaggagaggatattactctcaatatcgcagaaggtttacacccctatgtgatactgttcatgatatccagggaaaaagaggatattactccctatatcacaaagggtgtacacccctttgtgatattttttgtaatatccaggggagagaggataatattactctcaatatcagaaggggtgaaaaccctcctgtgtcattgttcataatatttagggaaggagagagtgatattactccaaatatcacagtgggtgtacacccccctatgatattgttcctaatttccagaaggggagatatgatattattgccaatatcgcagaaggtgtacaccttactctgacattgtttgtaatatccagatggggaaatgatgatattactcctaatatcacagggggtgtacacccccttgttttattgtttgtaatattcaggggaagagacgattatattactcccaatatcgcagggtgtgtacaacactctatgatattgttcataatatccaggggaggagaggaagtgtacacccccccgtgatattgttcgtaatatccagaggtagagaggatgatattactcccaatattgcaggtggtgtacacctttctgtgatattgtcatgatattaagaaggggagaggatgatattactaacaatatcacaaaaactgtacactccctgtgatattgttcataatatccagaagaagggaggatgatattattctgaatctcgcagaagatatacaccaccctgtgatatggttcataatatcctaggggaaagaggatgacataactgtcaatatcgcagggggtgtacaattccctgtgatattgttcacaatattcagagggaaaaaggataatattactttcaatatcgcaggcggtgtacacattactgtgttattgtttataatatccggaatgagagaaaattttctcccaatatcacaggaggtgtacactcccctgtgatattgttcgtaatatccagggaggggagaggatactattactcccaacatctcagggagtgtaggccccccctttgatattgttcctaatattcggaagtggagaagatgatattacttccaaaatcgcagggggtgtacactccctctgtaatattgtttctaatattcatgagtggaaagaaagatattactcccagtattgcaggggacatacaccacactgtgatcttgttcacaatattcgggggggagaggatgatattactcccaatatcaaagtaggtgtacacccccttctgatattgatcgtaatatccagaattaaagatgataacgttactcccaatattgcagggggtgtacatttttgaatactgttcataatattaagagggggaggggatgatatctgtcccaatatcgcaaagtgtgtacacctcctgtgacattgtcccaaatatccagaggaaaaaaggatgttattactcttaatatctcagagagtgtacacctccctgtgatattgtttgtaacatccagaagaaagaggctgatattactcttaatatcgcagggggtgtacacccccgccccgggatattattcgtaatatccagggggaagtggaatgttcagaatgggagaggatgatattacttgcaatatcatagtgggtgtacaccccactgtgatattgtttgtaatatccgggaaaggagaaaatgacattcctccccatatggcaggggctgtacaccacctatcatattgttcaaaatatccagaaggggagaggatatgtctccaagtatcacagggggtgtacaccccgctgtaatattcttcctaatatccagggtgtgagaggataatagtactcccaatatcccagggcatgtacaccccccttgtgatgttgttcctaaaattcatggggagaaagaatattactcccaatatcacagggggtgtacatacactctgtaatattgttgccaatatgcagcaggagagaggatgatattactcccaatatcacaggggctgtacaccccgctgggatattgtttctaatatcaagggggaaaaaggatgatattactcccaatgtcgcagggtgtgtacttcctctttgtgacattgttcctaatatccaggagagaagagggtgacattccttccaaaactgaaaggggtgtacacaccctttgagatattgtctttaatatccagaacgaaacaggatgatataactcctaatactgcaggggggtacaccctctctgtgatactgtttctaatatccaggaggggaaagaaaaatattaatcccaatatcacagggggtgtacattccccctttaatattgttcctaatatccaggaagacacaggatgatactatttccagcagcacagggcatgtacacccctttgtgatattgttcctaatatccaggaaaagagaggatgatattactgtcaatattgcagggcgtatacactggttctgtgatattgtttctaatatccgggggtggagaaaatgatattactcccaatattccagcgggtgtacacccgttctatgatattgttcctaatatctgggggagagagaatgatattattgtcaatatcacaggggatgtacagattccctgtgatattgtttctaatattcacagggggagaagggtataatactcccgatatcgcagggggtgtacactccccctgtgaagttgttcctaatatccagggattgagagaatgatattactcccaatatcacaggcggtgtaaaccccctgtgtgatattgttcctaacatccagaggaaaagatgatgatattattttcaatatcacagggggtgtacgcatccctgtgatattgtttctaatatccaggggaggagaggatgatattattgttaatatcgcagggggtgtaccccaccctgtgatactgttcctaatatccggggtggaagaggataatattgctcccaatatcgcaaagggtgtacaaccttcctgagatattggtcctaatatccagggagggagaggatgatattactttcaatatcacagggagtttacacaacccctgcgatattgttcctaatatccagcggaagaagagttaggataatactattttcaaaattgctgggtctgtaccccctccccgtgatattgtttctaatatccaggaggggagaaagtaatatgactcccaatatcttagaagatgtacaccctccccataatattatttcttacatccagggggtagaggatgattttgctttcaatatcacagagggagtaaacctttccggtgatattgtttttaatatttaaaaagagagaagataaaattactcccaatacaaaggggatgtattgtgtactcccccctctgatattcttttttaatatccagatggagagaggatgatattactttcaatattgcatgggatgtataaatcccctgtgttattgttctgaatatacaggtggggagagtatgatattactccaaatatcgcagggggttctttccccctgtgatattgttcctaacattcagggagggagaggatgatattactcttaatattgcagggggtgtacccacgcctatgatattgttcctaatatccagagggggagaggatgatctaactcagaatatgacaaggggtgtacacacagcctgtgatatggttcctaatatacaggggagaaggggataatatttctcccaatatcgcagggggtgtacaaccccctgtgatactgttcctaatatacagaaggggacagcatgatattgttcctaatatcgcaggaggtgtacaacgccctgtgatattgttcctaatatccagggcgggagaggatgatattaccctcaatatcgcagggggtgtgcactttccctgttatattgttcctatgatccgggtggggggaaatgacattagtcccaatatcgcaggatgtgtgcaccgctcccccgtgatattgttcctaatatcaagggggagagaggaggatattactcccaatatcgcaagggatgtacatcctccatgcgatattgttcgtaatattcaggaggagagaggatgatattactcttaatatcgcagaaagtggacacccaccctgtgatgttcttcataatatccagggaagcagacgattatatgactttcaatatcgctgggagtgtacatcccttttgggatattgtttctaatatccaggaagggagaggattatattactctcagtattgcaggcagtgtacaccttttttgtgatattgttcctaatattcagaaagggaaaggatgatattactcccaatattgcaggtggtgtatatccccctctgatattgttccttatatcaaggaagagaaagaataatattactcccaatatcaaagacagtgtagacccctcctgtgatattgtatttaatatccatggggaaagaggatgatgttactcccaatatcgcagggggtttacacccacactgtgatattattcctaaaatccagtggaggagaaaataatattgctcccaatattgcagggtgtatacaggccctcccccgttatattgctcctaatatccagcggtggagaggatattactttcaatttgtgtagggagtgtatacccccctgtgatatttttctaatatcaaggatgggaaaggatgacattactcccaatatcgcaggaggtgtacacgccctgtgatattgttcctaatatctagggaaggagaggatgatattactttcaatattgcaggagctgtacaccctctgtggtattgttcttaatatttaggttgggagaaaatgatatgagtccaaatatcgcagaaggcatacacacttccaataacattgttcttaatatccgggggagagggtgatattactcccaaaatctctggggggtgtacacccccttctgatatttttcctaatatccagggaaggaaacgatgatattactataaatattccaaggagtgtacaccttcctaatatcctaatattgttcctaatatccaggggtgggagaggattatattactcccgatatcgcagtgggtgtacacccctcctgtgatattgtttctaatatccaagctaggagaaaatgatatcactctcaataccacagggggtgtacaccttccgcatcatattgttcctaatattcagagggaaagaagatgaagttactttcaatatcggaggggttgtacacaacccctgtgatattgctgctagtatccaggaagaaaggggattatgttactccccttatagcagggggtatacacctcccctgtaatattgttcctaatatcaaggctgggatatacgtggggggaaggatgatattactcccaatatcgcaggggttatacaaccttctgtgatattgctcctagtaaccagggcagaagaagatgatattactcctaatatcgcaggaggtgtacactcccccattatgttgttcccaatatgcagaaaaggagaggatgacattattgccagtatcgcagggtgtgtacaccacccctgtaatattgttccaaatatttagggggagagaggatgatattactcccaacatcgcagggggtgtacacacatcccctgtaatatagttcttaaaatctaggggaaaaggggatcttatttctctaaatattgcagagggtgtacactccccggtgatattgttcctaatagccgggagggagataattaaattactttcaatatctcagagagtgtacatcgcccttgcgatattgttcctaatatccagagcaaaagagaatgatattactcccaatatcttaggagtgtacatttaacctgtaatattgttcctaatatccagggggaagagaatagtattactgccaatatcgtaggggttgtacaccttttctgtgatattgttgcaaatatttagtagagggaaagaatattactcgcaatatcacagggaatgtatacttcccctgtgatattgttctgatatccagaaaaagagagggtaatattactcccaatattgcagggggtgtacaccccccttgtgatattgatcctaatataaaggaaggaagaggatattactcctcatatagaaggggttgtccaccccccttgtgatattattcctaatattcagggaagcagaggatgatattattttcaatatcacagagggtgtgcagtccacctgtgatattgttcttaatattcggggggagaggatgttattatgcctgatatcgcagtagaggtacacccctcaagtgatactgttcctaataaccaggggtgaagaggatgatattactcccaatatcgcaggtggtgtacacccccccatgatggtttctaatatacagagggggagaggaaaatattactcccaaaatcgctggaggtctacaccccccttgtgatattgttcctaatatccaggaaaggaaacgatgatattactgtgaatattccagggggtgtacacccgctttgtaatattgttcctcatatccagggtgtggagaggattatattactcccagtatcgcagggggtgcacgacgcccctgtgatattgtttttcatatccaggaggggagattattatcaatatggcaaggggtgaacaccccctgtgatattgtacttaatagttaggttggcagaaaatgatattagtctcgatatcgcagggggtgtgcactccgcctggtgatattgcttttaatatcaagggggagaaaatggcattactcccaatatcgcagggggtgtacaccgctcatgtgatattgttcctaatatccaggtggagagaacataatattactcccaatatcgcacaaggtgtacacccctcctgtgatatggttcctaatatccatgggaggagatgatgatattactcccaatatcacaggggatgtacaccacccttgtgatattgttcctaatatccagggaagaaaacgatgatattattgtgaatattacagggagtgtacacactccctgtgatattgtttttgatatacagggtgggagaggatgatattactcccaatatcacataaggtgtacaccccccgtgatattgttctaaatatttcggtggggagaaaatgatattagtctccatatcacagggggtgtgtgctcctcaggtgatattgtttttaatatcaagagggggaggagattatattactttcattatcacagggggtgtacacccctcctgtgatattgttccttatatccaggcgaggggaaaataatattactctcaatatcgcaggaggtgtacacaccccatgtgatattgttcctaatattaagggggaaagaagataatattactttcaatatcacagggtttgtactcctttcttgtgatatagtttttagtatccagggggaaagagcatgatattactcccattgtagcaaggggtgtacacacctcctgtgatattgttcctaatatccagaagtggtgaggatgatattactcccaatatcgcagggggtatacaccccacctatgatattatttctaatatccatgggaaaagagtatgatattacacccaatgtcgcagagggtgtgtatttttcctgtgatattgtttctaatattcaggcggggagaagatgatattactctcaatatagcagaaattgtacatccccgctgtgatattcttcataataatcagggaaaaagaggatgatattactaccaatattgcaggggggttacacttcccctatggtagtgttcctaatatccaggaagaaagaggatgatattaatcccattatccaggaagtgtacacccaccctgtcatgttgttcctaatatccagcagggaagaggatgatattacaccccccccccgtgatattctccttaatatccaggaggggagaggctgatattactggatatatagcaggggtgttcataccttctgtgatattgttcctaatatccagaaaaggagaggatgatattacttccaatatcgcagaaggtgtacacctccctgtgatattgatcctgacattcagaaggggagaggatgatattactcaaaataccgcagggcatgtgcattcccttgtgatattgttcctaatacccagaagggaacaggataatattactttcaatatcgcagggagtgcacacccccctttggtatggttcttaatatccagaaggaaagagggtgctattactttccatattgcaaggggtgtacaccccactgtggtatggttcataatatccaggcagggagagggtgctattactccccacagtgcggggcatgtacaccctgctgcggtacggttcctaatatccagggggagagaggatgctatgactccctatatcgcggggtgtgtacacccctgtgtggtatgttttgtattctccaggaacggagagggtgttgttacccctcatatcgctggaaatgtacactcccctgtggtatggttcgtaatatccaggggattgagggtactgttacccccatactccccatatcgtggggggagtgcacctccctgtggtatggttcgaaatatccagggtaagagagggtgctattattccccattttgcaggaggcgtacacccccctatggtatggttcgtaatatccggggtgaggggatgctatcaaaagaagagagaaagagaccccccatattgttctatattattttatactcagtacctgttttaagaagaaacaaggaagtgaaaccaaaagcaggcagcccggcgccaggcaccagacccaaaaccagacccgaaaccaggcctgggcctgcctgaccttagcctgatagttaaaattcaacccatgacctagcaaccaatgttatccatagattccagacattgtatggaaggacattgtgaaatttcttgttctgtgctgtttcactctgattaccggtgcctgcagcccctgtcacatacccactagattgctcaatcaatcatggccctttcatgtaagatctttagtgttgtgagcccttaaaaaggacagaaattgtgcactcaacaagctcggattttgagacgctagtctttcgatgcttccagctgattaaaagccacttccttcactacctcggtgtctgtggggttttgtccgcgactcctcctgctacactatgactccccatatcaaggggggtgtacacccccctgtggttcgtaatatccagcaggggaaaaggtgctattactccccatattgcagggagtgtacacccccttgtagtatggatcgtaaaatcaaggggggagggaaggtgtaattatccccatatctcagggggtgtacacccctttgtggtaaagtttgtaatatccagggatattacagggatattatccccaaattaatacttttataatttcttatgcctgcctttactgcaatctctgaacataaattgtgaagatttcatggacatttatcacttccccaatcaatacttttataatttcctatgcctgtctttactttaatctcttaatctcatcatctttgtgagctgaggatgtatgtcgcctcaggaccctgtgatgattgcattaactccacaaattgtttataaaacatgtgtatttgaacaatatgaaatctgggcaccctgaaaaagaacaggataagagcgatgttcagcgaacaagggagataagcataaggtctgactgcctgtggggctgggcagaacagagtcacatttttcttattgcagaaaatgagtaggagaaatatcactgggaagggaacgcattcctaggggaggcctatggacggccgctctgggggtgtatcccttatgtggttgaagataagggatgaaatacaccctggtcccctgcagtgccctcaggcttgctaggattagaaattccagcctggcgaattctagtcagaccagttctctgctcttgaaccccgtttcctgttaagatgtttatcaatgacaatgcgtgcacagcaggacatggaacctcaatagtaattccattttctccctggccttgtgaccttgctaggcccttctgcccttgtgatcttttattgccatttgaagcatgtgatctctgtgacccactccctattcgtatccccctccccttttgaagtccctaataaaaacttgctggttttgcagatcaggtggtcatcacagaacctgccgatatgtgatgtcaccccggaggctcagctgtaaaatttctctttcgtactctttcactttatttctcagaccaggtgacacttaaggaaaatagaaaagaacctactttgaaatattgggggctagttcccccaatagacattgttcctaatatccagaaaaaaagaagatgatattactcccaatatcacaggggttgtgaaccccacctgtgatatggttcctaatatccaggaagggagagaatgatattactctccatattgcagggggtgtgcacatccctgtgatattgttcctaatatccaggggaggagagggtgatattactcccaatattgcaagggttgtaaactccaccctgtaatattgctcctaatatttaggatttagggggggagaggataatattactcccaatatcgcaggggatgtatatgccctctttgatattgttcctaatatccagggggggagaggataatattactttccatatcacaaagagtgttcacccccctgtgatattgttcctaatatccaaaaaggaagaggatgatatcaatcccaatatcacaggaagtgtacaccccccccttttatattgtttctaatatccaggggaaatgagggtgatatttctctcaatatagcagaatgggtacactccccctgggatattattcctaatatccaggggaaaaaaagaggttgatattcttcccagtatagcagggaatgaatacaccctttgtgatattgcttctaatatcaaggggaaaagaggatgatatgactcccaatatcacaggggatgtaaacctgtggcgttgttgctaatatcaaggagggaagagtatgatattactcctaatgtcgccgaaggtgcacactttccctgtgatattgttcctaatatccaaaagggaagagaatgatattacccccagtattgcagggtgtacaccacccctgtgatattgctcctaatacccaggaaaaaagagaatgctattacccccaatatctaaggggacgtataccttccctgtgatattgtttctaatatccaagtggggagaggatggttttactctcaatattgcagggagtgtacactccccctgtgatactgtttctaatactcgggctgggagaaatagtattactcccaatatcgcagtgatattgtttccctgtgatattgtttctaatatctagtgggggagataattatattactaccccatacacaggggagggtgtacattcccctgtgatattgtttgtaatatccagggaaggagaggatgttactcccaatatcacaggggttgtacaccccttttttgatattgttcctaatatctggggggcagagaattatattactgtcaatatcacagagtgtgtacaccccctctgttatattactctttatattcagggcggtagaggatgatattactccctatatcacagggggtgttcacccctcctgtgatattgtttataatatctaaggggaaagaggatgatatcactctcaatatcaaaggaaatgtacacctttcctgtgatattgtttttattatataggggggcagaggatgatattaagaacaataccacaggggatgtacacccacgtattgatattgtccctaatatgtatggggaaagaggacagtgtaactcccgatatcgcagagtgtgtacacccccttgtgatattgtttctgatatacacggggagaaaagataatatttcttccaaaattgcagggggtgtacaaccccctgtgatattgtttttaatatccagtgggggagagaatattactcccaatattgcagggcgtgtacacaacccctgtgatattgttcctaatatccagagtaggggaggatgacattactttcaatatcgcaaggggtgtacattcccctgtgatattgctcctaatatccatgaggggagaggatgatattattcctaatatggcaggggctgtacaccttccctgtgatattgtttctaacatccagtgggggagaaaatgatattactccctatatcacagaaggtgtacactttccctgtgatattgttcctaatatccagaaggggagaggataatattactcccaatatcgcaggaagcttacaactcccctgtgatattgtttctaatatccagggaggtagggatgatattactcccaatatcgcaggggatgtacactcccccgtgacattgtttctaataaccagggggtgagaggatgatattacgcttaataccgaagggggtgtacacacccttgtgatattgtgcctaatagccagggggaagaaaattatattaattttaatatttatggggaaaaaggatgatattactcccaatatcacaggggctgtacaccgaccttttgatattgtttttaatatccagaagagaagaggataatattgctcccaatatcagaaaaggtgtaaaccccttctgtgatattggtcctaatatccagggagggagagaataatattactaccaatatcacagaaggtgcccacccccaaggtgatattgctcctaatatccaaagataatagggtgatgttactcccaatatcacaggaggtgttcacaccccttgtgatattgtttctaacgtacagggaagggagaggatgatattattcccaatatcacaggaggtgtatactcctctgtgatattgattttaatattcggggggaaaggatgatattactccctatatcgcagagggtgtacaccctctgtaatattgatcctaatatccagggcgggataggatgatattactcccaatatcgcagaaagtctacacaacccccagtaatattgtttttactatccagggggaagaggatgacattactcccaatttcacagagtgtgtacactcaccatttgatattgtttctaatatctagggggagagaatatattactcccaatatcacaggaattgtacaccacctctgtgacattcttgtgaatatccggggaaaaagagaataatattactcccaatattgcagagcgtgtacacccctccatgatatcgatactaatatttttttaaagaggatgatattactcccattgtcacaggatgtgtacaccccccttgtgaaattgttcataatattctggggggagagcataatattactccccatatcgaaaaaggtgtccaccctccttataatatggttcctaatatccaggatattacttaatccaggatacttgtaataccctaaatatacaattgcttgaacctccacctcccaggttcaagcaattcttctgcctcagcctcccgagtagctgggactacaggggcacaccaccacacccagctaatttttttttcttgtatttttagtagagatggggttttgccatattggccaggctggtctcaaactcctgaccttgtgatctgcccacctcagcctcccaaagtgctgggattataggcgtgacccaccgtgccaagccaggaagaggatgctctatagatttccccaataagagatggctttgcagggccattccaaaatatgtcaaagaaatacatttggggataaaatactttgatttcctttagggaatgttatctattatgtgatgctataccagagtcaggttggagtcggttatcttattgcaacaaagagtctgttccgtcactgttgggatctctattttttcctcttatttcttgagacagggtctcactctgtcacccagtctggagtgcagtggtgcgatcttcattcactgaaacctctgcctcctgtgttcaggtgattctcgtgcctcagccccttaagtaactaggattacaggtgtgcgccaccacacccagctaatttttgtattttcagtagagatggtattttgccctgttggccaggctggtcttgaactcctggcctcgtgtcatctgcccacctcgacctcccaaagtgctgggactgcaaatgtgagctattgtgcccagccaggatctctgttttaatgttagtgctggtcactttgcatgaactccaaagggaagaaatataatgaggtgtgtctgaccccctgccttctcatcgtgacctgaattagtttttcaggtttgcaggggatacccttggacaagaaggggctctattcggttggttggggggattagaattttactttttgtttacaatatttctcctgaaagagttaggggctcacaaggaatttccgcgtgagcaacttatgaggaaagccatctgggaagatatgtgtccttgtgtcactgggatattctcgtttaccccaatgatacggcaatgacgcagggttgtgaaattacagctatgtgtttggggaaaaaagaaagcaggattgtgtgactacgtttccaaacttcacttgcccttagccatagtgagttgggggcctggagattctgttttctttcacaatgatatagatacaattaaatgtatagaaagcaaaaaaataaaaaggtgagtaatgaggaacctctgattcctgagtggccatgtagttacccatggcacagagccacagttactgaaggtaaagtttgctggggaatttagaaatgaatccagctcttggaggagtcagtttactggatgcctaagaaaatgcaaacaaaataagaaaaaagggtaatattcaatcccatagttattgttacctgtcatagctaaagtaaaattaaaacagagtgctggcttcaatcttgatgctacactaagcttagatttcagtgaatgtgagtctcagccactagctcagagccacctcccaaagaccaaatcatgtagggacaatagaaagtacttctgagaattgtggttaccaagaacctagtaactgttggggaggagcaaaacaaagtacagaaaccagagggtacaatctgagtgagactgctatcagcttctggaggagcctttactaaaatgaatgatgagagtaactggatgatgagagtaactaatggatgatgagagtaagcaatgtctttggttttcttttttttttttttttttttttagcagacgtctcactcttgtcgcccaggctggagtgtaatggcatgatctcgcctcactgcaacctccacctcctgggttcaagcaattctcctgtctcagcctcccgagtagctgggactacaggcactcatcaccacacctggctaatttttgtatttttagtattttctggtgagggtccaggtttccggaaacaactcagagacatatgttaagatgttatctttagttttcacagggaaccaaatatgttacgactccaatttccttggctattgttttaagttaccattaccttctcgttgatcaagttgctcatttacttctcaagcctagctagatgcctggaatttcccttgaaggaagtcaagattttcctttatctccatactggctgatggtgatcgagtaagcccctaagaggggtccctgctccatctcgagatgctgctagattctacagtgcctaataaacagctctcgcctggccgacaaagagctgcttgctctctggatagcaattccaaagtgaacagacaacatcctgtttggaagactgccactctgttagaagaagcatcaggaaaacctttcttttgagctatttataactaacagcaattgaccaagtatacttttgtgagtgaaactgacctttctccctgtaagaattctccaaaatttggaaactatttgtgagtatttttacttatggcaatataattattggcacaagctcaatcagattcggttttctttcgtaacaggaaccattggagatactcattactctttgaaggcttacagtggaatgaattcaaatacgacttatttgaggaattgaagttgactttatggagctgataagaatcttcttggagaaaaaaagactgggtatattttcaatatgctttccttttaaggtccctcacctgtggaaagtaaagaatgtcactttctgacaggctcaggaacctcaagttatgtagggatctcaagaagatgggggaattcacccagttcatacaggtgaaattgctgttgcaaagattatgaatatgagagaagtccagcatggctgacttcatctcgtgtctggcctcaggctggctgcccttgctcactcttgggcataggccaagctagccatgggaggaatttagtttatagtttaactttgaagcacggatgataatagtctctccctaaaatgaaccccttccttgctcagggactgaaactacctttgtatgacaaatgaaagcccacaagattaagattatgagaggggcctgaattctgctaaaatgcaggtgtagctgactgataacaagtcattgtcccacagcttgcctttctataatctcttgcttctcaggagtcacatggccagaggtcctgagatttccagtcctgtgacccccacccagagatggacttagtgcatgaggaccattttccacacccctatgatttcatcctcaaacaatcagcagcaaccattccctagccccctgccttccaaattatccataaaaatcctagcctctgagttattagggagattgattaataatcccagtcctaccccttgggttgctctgatttaattaaaccttctctactgcaataccacggactcagtaaattggttttgtctgtgcaatgggcaagaagaacatgttgcatggttatacaggtactacaagcacagtctgatggcaaattattggttttgcttcctgcccttgatgtttctaaacatctagtccaaaattacttgtgaaaggtccagcaaagccaattttaaaagaggctatatggccaatcactattctttctacacattattgcaaataatcaggccacggctgggcacggtggctcatgcctgcaatcccagcactttgggaggctgaggcaggatcacctgaaatcaggagttcaagaccagcctaggcaacatgataaaaccctgtctctactaaaaatacaaaattagccaggcatggtggcatgcacctgtaatcccagctacttgggagactgagggaggagaatcacttgaacctgggaggcagagattgcagtgagctgagatcacaccactgcactccagcctgggcaatagagtgagactttgtctcaaataataataataataatcagaccaagtataatgaaattaaaatttattttgcaaataaattggtcctactacaatttatccttcatagaaatgtggaaactgaagataaaaaaaattaggtttcagaagaaaactatactacacctgttattagattctagccctaaacattgtttttgaggtttttattatttacctgcaatttggtctaaattctgaattatttcctgactacaagtatccaaggaataaatgggttttctttttctttatgatagttttagttggcttctaatgcaacaacaatttttattgtaatcctgtgtgcattctattcctactattcaaattattaatgttatagatctttcattgtagtacttctgaattaaccaaaatcacagtattctgaagatgattctacaaagcctgctgtttctacaaaggctgctgatgatttctacaaagcctgctgtagtgttgctgtggcctctgcttaaaaaagtagaaaacacattgatgcagcatgttcaccccaacctccctgcctaaaggctcagggaccatcttggaagaggaaggcgcgtgagattgtaagagccgaattagggggatggagtgtggagaataaggacacttcatcttggatgctcacctgccaaattgacttctgatgaaagccagctccagaaatgtgcctacagttactactttcacctaaaccctgcccttagtcaaatccttctcttcttctaagcaatcaacttcaattccttgtataacccacagtataaaagggcttttataccattctatcctattgcatgtaagccttgggtctgggaggtaacagtgtgggattccaccatctcatctccctgccacccaaacatgcctgctcttctttaagcaatattaaatgtttgtacttcagaaatttgatttgtcagcctcttcttcagactctcagcttctttggcctttgggagtaaatttgcataggcctgctcaaaacaggatgttctgggggtttgggggtgttgttttgttttgttttttgttttgtttagagacagggtctcactctgtcacccaggttggagtgcagtggtgcaatcatggcacactgcagcctcaaactcctaggctcaagcaatccccccaccttggcctcccaaagttctgggattacaagcataagccaccatgcccagccctggacttttctttaaagacatttacacagtgtaggaattactgtgggtgcactgctcaggtccccttctccaggatgctcattcctacctcatagatgattttcctgcagagatttgacctcagctgaagggcagtcacctggtccaggtggttgctattcacctccttcctgagaacagccaacagccagggacacgctagcacagagatataagagcgaccaaggtgaggccccttctgtgctgcggtgcatgctccagagcctccctgggatcagacttaagagggtctccagccagatctggtcttcgctgctttcctcgagctccccagcgcactcctgcaatgcatcttttttttttttttttttttttttgagacggagtttcactcttgttgcccaggctggaatgcaatggcgcaatctcagctcaccacaacctctgcctcgcgggttcaagtgattctccttcctcagcctcccaagtacctgggattacaggcatgcaccaccacgcccagctaattttgtatttttagtagaaacgggtttctccatgttggtcaggctggtttcgaactcctgacctcagttgatcctcctgcctcagccttccaaagtgctgggattacaggtgtgagccactgtgcctggcccaatgcacctcttgaatcacctcctcatgctttgcttttagagaacatgatccccaacatgtgattccagcaaagattctagaaagccaaccgtgacaatcacttctgggtttagatgacccccccccaccacaagatggcagtgagcacctcatcacagaggtgctgatggtctgcagcaccgcgccaggccagaacgtgccttttacagaagaaaataacccagtagctgactaggatggtgaggagggctggtgagcactgcggtagtgagagggacactagcatcactgagatgcaagtgatggtcatttttcataggtcaaagctcaaagcaggggacagttacagggcagggcttcatagcaccagtgtgatgaaagtatctgggagtggctaaggccagcactatgccatgggaagcaaggtgggcctgaggaggaggcagcagcgtcagcctgcaacaagtgggggctgccctgcagagacctaagagtcatgttatagagcacagtgtctgtaaggccaagaagtgtggacagccaagtgtgtcaattactagacatactcaagaggagcaggaagggcagggcatggtggctcatgcctgtaatcccagctacttgggagactgaggaaggagaatcgcttgaacccgggaggtgaaaattgcaatgagccgagatttcgccactgcactccagcctgtgtgatgggagcgggactccatctcaaaacaaaaaaagaaaaaggaaaaagaaaaaaagaaaaacctaggtatacttctcaagcaaataaaaataatcaaaaccaatatcatgcccgggcacaaatttcatatatataacagatttaaatatatgagggtgattatcctctcatatctccatttttttttgtttttccatttttttctttactaaaaaaagttaatgccaatgacacacaatttttttttttttttttttttttgagatggagtctcacttcttcgccctggctggagtgcaatggcgtgatctcgactcactgcaaagtctgcctcctgggttcaagcaattctcctgcctcagcctcccaagtagctgggaccacaggagtgagccaccacacccagctaatttttgtatttttaatagagacggggtttcaccatattggccaggctggtctcaaactcctgatctcaaataatctgcccgcctcggcctcccaagattctgggattataggcgttgagccactgcgccccgcctatgtatgattttttttttaattttattttcataagtttttggggaacaggtggtattttgttacatgagtaatttctttagttgtgatttgtgagattttggttcacccatcaactgagaagtatacactgaacccaatttgtggtcttttatccctcacccccttcccaccctttcccccggagtccctgaagtccattgtatcattcttatgcctttgcatcttcatagcttagctcttgaacccttactttctgtttgagggagaagacatatcatctacaagtagatactgtgtaaacattccattgcatgactatcccataacttatttattatttgtgtttggttatttgctgctatgtaacaaccccactcccaactaaatggtgtgacaattccatgattctgtggatcaaaaattctgaaaagtcaaacccaaggagttttgtctctgctccatgatgctaaagcctccgcaggggtgaggcgaatggctcagggtgactgaaaagctcagggttggaacagctggggatgaggcctctatgtataagatgattcttcactcacaggtctgaaactatggtggggacagccagaaggctcggctcagctgggacagtcacctgagccctacacatgacctctccaacatggtgatcctgaagcagttgggtttcttacacagcatcacacttttcttttttttttttttttttgagatgaaatattgctctatcacccaggctggagtgcagtggcacgatctcagctcactgcagcctccgcctaccaggttcaagcgattctcctgctccagcctcccaagttgctgggattgcaggcgcctgccaccaagcccagctaatttttgtatttttagtagagacggggtttcaccttgttggccaggctagtcttgacctcttgacctcaggcgatccgcctgcctcggcctcccaaagtgctgggattacaggcatgagccaccgcgcccggccaaagctcacacttcttatgattcagccttagatgtcacatcagttcattttccccacacttattagtgttagaagtcacaagcccacccatactcaggggactggcacacagaccccactctcaatggaaggggtgggacaccaccattcctgctgatgggcatttgggtaacttcctgtttgaagctattaagattgggctgctgtggccgggcgcagtggctcacgcctctaatcccagcactttgggaggccgaggcgggcggatcacgaagtcaggagatcgagaccatcctggctaacacggtgaaaccccgtctttactaaaaataccaaaaaaaaaaaaaattagctgggcatggtagcgggcgcctgtagtcccagctactcgggaggctgaggcaggagaacggcgtgaacccgggaggcggagcttgcagtgagccgagattgtgccactgcactccagcctaggcgacagagcaagactccgtctccaaaaaaaaaaaaaaagattgggctgctgtgactattctagtaggtgtctttggtgagcgcctacacgtgtttctctttttctctttagtatatgcccaggaggggaactgctggctcccagataccgtatgttcagggtcacacacacttccacagggttttccaaagcccttgtaccagcacgcactcccagcacctgtgtgactgctccagctgtcccacagtctcatcagttctattgctgatattttcattttagcttaagttatatttaataggaaaattaccgttgcctctgccccccgttcctgcctgtaggagtttctcgtagctgttgctacaggtggccacaaatctgtcacttaaacccacacaaattgatgtccttatggctttggagtcagaagtgtcaactgaaggtactagcagggctgtactgacctggtggcctcagggagcatctgtgctgcttctccaccttctagaggctgctgcatccctcgctccagccccttcctgacaccactcaccctcctacttctgttatcacatcctcaccttctctgtgttcagggctccctctgtctctctcttgcaagcacacttgggattccattgagggccacccacataacccaggagaatttctccacctcaatatccttaacaactgcagagcccttttgccataaaagttaccattcacgggttccagggattgtgacatgggtagctttaggagtgattattcctgcctgtctcccgctcaccagaacttggactttctctctcaacaggagccccctgtgtgggaatagcctgtctcaacgacgccctctataaggacctgcttcctcaaaggacctcatagtcgggtcctgcccctcagtgtccagtctgccttggctggaggggctgcaggggtgtgttggcgccacctggtggagacagggcatcacagcaggtgggagcccagtagaagcacaaccaaaacatgggtaatgtttaaaattttctggctaagcgctgtggctcacgcctgtaattccagcactttgggaggccgaggtgggtggatcacatgaggacgggagtttgagaccagcctggccaacatggtgaaacatcccctctactaaaaaatacagaaaaattagctggacatgtggcgcgctcctgtaatcccagctactcgagaggctgagacacgagaatcgcttcaaccccggaggggttgccgagatcgcgccactgcactccaggctgggcgatagagcgagactctgtctcaaaaaaaaaaaaagaagaggggaggcgaggggaggggaggggaaaagggggaatttgtttggagctgagacatccatcttctcctgacctcagatatttgcactcctggttatgaagccttcacacttggactgaatacaccaccagctttcccgatttccagcgtgcaaatggcagatcgtgagacttctcagcttccataattacatgagccaatttatatatataaattgggtcctccagaaaaacagaataaattatatatataattatacgcataacttaattaaattatacgtataacttagctatatatataatttattctgtttttctgaagaaccctactgacacaaatgttgagcatcttttcatgtgcttattggcttaataacttgtacatcttctttggggaaatgtctattcaagttctttgcccattttgtaactgaactattaatatttgtctttacattgttgagttgtaaaagttccttatatattctagatactagagccttatcagatatatttctgcaactattttctcctaatatataggttgtgtttttattttctttttctttttttttttattgagacagtctcactctgtcacccaggctggagtgcagtggcatgatcttggctcactgcagactcgacctgccaggctcaagcaattctcccacttcagcctcctgagtagctgaggttataggcacttgccatcgcacccagctaatttttgtattttttagtagagccgaggtttcgccatgttgcctaggttggtcttgaactccctgcctcaaagcgatctgtcagcctcagtctccctaagtgctggaagtacaggtgtgagccacagtgcccggccatctattttcaatagtgttttttgatgtacacaggtttggaattttgataatgttcaattcatccatttttttttttttttttttggttctttctactggaccaccactcttgagccctctaatccaacctccacgcggcagccagagggagctctctaaatgtaattactctttccctgctccacctgctcaaaacagtgtcacatttgtgatttaaaacagtatttctcaaacctaatttgcaaacaaagcaggtggaactcttcttgtatgcacagcatctgatttggttggtctggcatgggtctgggagtgagcacacctaccaagcggctgctggggtaacttgcgttttccactgatgatttcagcaatgtttccggtcccacatgctcctccagaaccttgtactcccccatgaaaaggtggagtccatttccccttcctttatttatttttttgagacgaagtttcactcttgttgcccaggctggagcgcaatggcgtgatctcagctcaccgcaacctccgcctcctgggttcaagcaatgcttctacctcagcctcccgagtagctgggattacaggtatgtgccaccacgcccagctaattttgtatttttagtagagacggggtttctccatgtcggccaggctggtctcaaactcccgacctcaggtgatccgcccgcctcagcctcccaaagtgctgggattacaggcgggagccaccgcgcccggctatttccccttcctttgaacctgatcaggacttgacgatggcatcaacatggtgagagtgaccctgcatggcttatgaggctgggttacacaaggcgatgttgcttctgactggctccctctcaggatacatgcccttggaacccatcctctaagctccttgggagcccaacttagcccatgtggagacaagacagggagagaaacagaggcacccccagccctcagccagcatcaaccgccagacaggagagcaaatgcgccaacaatgattccagctgaagcctcagacagcgtggagcagagatgagggatccctgcagattgcagatgcgtgagcaaaatgcatgctgtcactgttttgaaacaacaatgtctgggggctgtttgttatgcagcaatagacagctgtaacaatgctgttactgctgtattccatgaatgactgcactttgagtagcagggggctagatcactagataagccccatggcttctgtgtatgctatttttctacttttatatccttttcattcactttttttttttttttttttgagacagagtctcactctgttgcccaggtgggagtgcagtggtgcaatcttggcggactgcaacctccacttcccgggttcaagcaattattgtgcctcagcctcctgagtagctgcgactatagatgcacccccatgcctggctagtttccgtatttttagtagagacggggttttgccatgttggccaggctgatctcagactcctgacctcaggtgatccacccaccttggcctcccaaagtgctgggattacaggcgtgaaccactgcacccagcctcattcactttctttacttggctcatttttccttgttgcctcaattctcctctaagatcactttcctgacatttcagcctgggcctgttgccttctctgggtcccctccgcctcctgtgcctcccccatctcagccttgatccctcagattatacttcctctgtccccaccctgaccatcttggctgtccctggatagggatgggtatcttctcccactggtctgggagatctggaaggacaggcctggaaaagacttggtcactgctggaaggagctcagttagtgtggtgctgaggacagtacgggtgaggctggccccttcacccaaactcccactctcttccatagatttcacctctgtggcccaggccataggattagggcaactccccttaaacatcgagtccatcctccaagctgtccttttttttttttttttttttttttttgagacagagtctcgctctgttgcccaggctggagtgcagtggcgcgatctcggctcactgcaagctccacctccagggttcactccattctcctgcctcagcctcccgagtagctgggactacaggagcctgccaccacacccggctaattttttgtatttttagttgagacggggtttcaccgtgttagtcaggatggtctcgatctcctgacctcgtgatccgcccgcctcggcctcccaaagtgctgggattacaggcgtgagccatcgcgcccggcctcatgctgttcttgaatagtgagcacctgttacaagtcgccccaccagcctctcacttgtacccccctcatctctttctccccaagagacagaggaccctggcacttgtgaagcatgacccagaccctggggccatggcatccaacatcctcattccccatgacccctactgtctagatgtagctgccaagagacccccagactccccgggcctctgtctagagtgccaagacagagagagaatgccctgccgcttgcatgctttgtggggtgtccttcccccttccctggctgctaggcgtgacttcaacgttctccccaacccccaaacagcagcactgacaccagctgcagacctggctcaggttagctaatgaggaccaggctggggatggagcctgaacccctaaaccccagtcctgtaccccaccctaatcctggggtctccactggacaaaacgaagcagcttggtttttcgttgttattgtttttgagatagagtatctctctgtctcccaggttggagtgcagtggcgtgatctcagctcactgcagcctccgcctcccgggttcaagtgattcttgtgccgcagcctccccagtagctgggattacaggcgcgtgccaccacacccagctaatttttgtatttttagtagagacagggtttcaccatgttggccaggctggtctgaaactcctgacctcaagtgatttcccagcctcggcctcccaaagtggaagcggcttatttttaaggagaaaactcccgtggaaaggaatcagcacctcctctgtcaacatttcacttctctgaaaagactctcacttccaacagaaagtgctttgtaacacaacaatgaggctgggcgaggtggctcatgcctgtaatcccagcactttgggaagctgaggcgagtggatcacgaggtcagaagttcgagaccagcctgaccaatatggtgaaaccccgtctctactaaaaatacaaaaattagttccgtgtggtggcgtgagcctgtaatcccagctactcaggaggctgaggcaggagaatggcttgaacccaggagatggaggttgcaatgagccgagatcacgccactgcactccagcctgggcaacagagtgagactccgtctcaaaaaaaaaaaaaaaagaatgagaacatatggacacagggaggggaacaatacacacaaacaaaatttagaaacaggtgaaaataattttagtaatatttttactaatactgatatgctcaaaatattattatttcaataagtaatctaaaaattattgagatgtcttatgttcttttcatcatactaagcctttaatatttggtgtgtattttacactcacagcacatctcaatttgcagtccccatgtttcaagcactaaataaccatgtgtgtccggtggctaccatactggacagcgttgatctgaaatcgcatctgtatgcatcaccagcatatttgcagagatccccatctcagcagcacacctgaggctcatctgcgaaagcacctgcaacttctctacaacctcccacatcacctccaaacacatcctcatgtcatctgcaaacacacccatagctcacaggccaatgcctaaatatcattgcaggcaccttcagagaaagcacttactaaaggggtatacttgattccacatctgctttgacctgcaaatctcccttctcctttacatacatttgcatctcatttgtatgtcaatctaaatccactggcagagcctcagatcatcatctcaaagtcaggtggatgtggggctgggcaggcctccaggtgttcctcctcctgcttcctctggggctcttgatcctcctcctcttccttgctgctctcctcctcctcctccaatatggtgaccagttcctcccgcagcgcccccatctccagccccaggctgcacagctgtcccagcagctggacatccactcggcgcaggttcccctgccagtaggaaggggacgtcacagggatgccaccccagagagcaaggggtctctccaggacctgggtgagagcaggtcccaactcatgtcctggccacagcgcctgggcagggtcctcactgtgcccatggaccctaactgccttcctgcttctcagagtgtctcttgatctctaactcttctctttgtctctccatttcattgtccctgacttctctctctctgtctcctccctctcttatctatatctgtccctgtttccctttgtctctgtccccatttattttttgtctttccatgcccctgtctctctgtctttatgtgttgccatttctctgcccctgcctttggctctctttctctcgcttgccctctctctgccctccccaactttctcaaattcagtctgtctctccatctctgttcctgctctccgtctctgcttcccacctctgtccctctcttttgggatctccctgtccccacctctgttcccgtccctcactctatgtctgtctctcggtgtctgtacatgcctctcatgtctctgcttctatctctcagattctgtttttcgatctctggccttctctatttttgttcatttccattcattctcatttcctctctttctctttcccttccaaacccctcactcaccagctcctccctgatccacagcagactatcgcaggcacctccagtgtctgcccctgcagtcctgagggtctgaccagggatttccactggggagacctccctcagggcctgggggggtgggcccagccccggaggcaccagtccagcctgattcagctgcctccacagttccatcgtctctgagctatggctgcaaggagcaggaagtagcaaggtccagggtggcctggtcccctggggagctgtgtgcgtggtggagagtaaagggcagagggagtgggatgggggttcctgggaaaggtatcccaaagtccactcttcagagagaatcagctggccttgtgcttttctttttccttctgaagtctaacctcaactctgctcacagggttcaaacatagcctcttgcagaggtctaactccacccttccctgcctgtctcaggcctgacccctcaggggcgctcagtgtctgtagatgcctggcaccctctgtccttccacctgccccccaccaccacttctccagcctctcctcagcctccatttgacctctggcttgcccatagcttggtccttgcttgtcctcttggcacgggtcatcctagggctttcccaccagtgtgcctttgggggcaggaatggctcccaggggcaccaagacagcaatcccttagctggagtgcctgtgtccaggctgctggcctagggccaagcagccaattctgctgaccctggacttgcctatgggtatattatccctgttgagggtgagggcttctgctgtggaaaagtctgggaagcactgcaggcctctctcggccttggacccttccttcagacccaaggtgcatatatatacatatatataatggtagatcacgaggtcaggagatcaagaccatcctggccacatggtgaaaccccgtctctagtaaaacacaaaaaattagccgggcatgctgccgcgtgcctgtagtcccagctactcgggaggctgaggcaggagaatggtgtgaacccaggaggtggaggttgcagtaagccaagatcacgccactgcattccagcctggcgacagagcaagactccatcttaaaataaacaaatgaacaatatatatatatatgtattttgttttttgagacagagtctcgctctgtcatccaggctggactgcagtggtgcaatcttggctcactgcaacctccgcctcccgggttcaagcgattcccctgcctcagcctcctgaacagctggggttacaggtgcacgccaccacacctggcgaatttttgtatgtttagtggagacggggtttcaccatgttagccaggctggtctcaaacccctgacctcaggtgatctgcccacctcggcctcccaaagtgctgggattacaggcgtgagccaacgcgcccagccccaagtcccttttaccatagaaagtaacatagtcacagtgcccagggattcacaggtatggggagagggttcgttattcagctgccacacccaccttcctaaacctgctgcccttccagtttcctcacgtgcacagccacgcccgtctgcttttagtttctcaatctgttggcttaaccttcaaaacaggcccaggatttgagcacttctcaccattccctctgccccatccccattcatctcttgcctagactgctacagcagcctcttttactggtcccctgcatccacccttgccctctaaggcaagggtccccagtccctgggccaaggaccagtaccagcccctcgcctgctaggaactgggccgcacagcaagagatgagcagcgggtaagtgagcattaccgcctgagctccgcctcctgtcacatcagcagtggcattagattctcataggaggcaaaccctattgtgaactgtgcgtgcgggggatctaggttgcctgctccttatgagaatctaatgcctgatgatctcaggtggaacagtttcatcccaaaaccatccccaccccacccccgacccccagtctatggaaaaattgtcctccacgaaaccagtccctggtaacaaaacggttagggaccgctgctctaaggtacattctccacctggcagaaataatctttacaaaatgtaaatccgattttgacactcccttcttcccactgtgaatagaataaaaccctaccaggcctgcaccgtcagcccctgcccacctctcaacccagtctcctatctctgtctgcaagctggttcccacctcaaggcctctctgctctagaggctacctctccctgcagcgcttttcccctagatctttgaatggctctttccttatcattcacttctacttcaatgtcacctcttcagagaggcctttgctgatggccctacacccagtcacttttttttatctgcttctcatcaaaattgccttgctgattcctttgtttcttattcatcctctcccacatccatcctctcccagcccagaatgttgacttcctgagagagggactgggtctgtcctgctcaccatggtaacctcggcatctagaacagtgcctgccatcacgtggtaggtgctcagtaaatattcttggaactaatgaatgaataattctatccacaagacttcacaatggctcttcatgctgcgatctagctttcaactccaaactggtcttgagatctcacctcagtctctaaccttgacatctaacctcttcacccactctcttacctgaccctaatttttaaaaatgacgtggtcagcttttcagccccctcattccctgtttttaggaggtagtgagtggaagctggaagaataagaaagcttggggagactgcaattgcagtcaggaaagaaaggtactctgccgggaagaacaccccatcttctcctagggaaagattgtggagtcctggggtttgttttgtttttcaattttttgttttaagagacagcgtctcgctctgtcacccaggctggagtgcagtggcgcaatcacagctcactgcaacttcgacctccccggctcaagtgatccccccgcctcagcctcgtgagtagctgggaccacaggcgtgcaccaccacgcccggctaacattttattttttgtggatataaggttgccctatttctttgtggagataaaggctcccctatgttgcccaggctggtctcgaactcctggcttcaagcgatgctttcgcctcggcctccacaaagtgctgggttcacaggtgcgtgagcccgacctgtgtctcgttttgaagctcagggagagggcgctgtgagcaatccctaaaccctttaagagtaaaaagtgcgtgcacctttaagaggacggttagaaaacgcggggcgtggccacaggagaataagttcgcgctgaaccaggagcgtgggataagaccggccccttccggttacgaaaccttagcaagatggcggctccctgggcgtccctgcgcctggtcgcccccatgtggaatgggcgtatcaggggcatccatcgcctgggtgcggcagtggccccagagggcaatcagaagaagaaaaggacaatactccagttcctgaccaactatttctacgatgtggaggctctgagggattacttgctccaaagggagatgtacaaggtgcatgagaaaaatcgatcttacacctggctggagaagcaacatggtccatacggcgcaggtgcctttttcatcctgaagcagggaggcgcagtcaagtttcgagacaaggagtggatcaggccagataagtatggccatttctctcaggagttctggaatttctgtgaagtgcctgtcgaagctgtggatgccggtgactgtgacatcaactacgagggcctggataacctcctccgcctgaaggagctccagtccttgtcgctgcagcgctgctgccacgtggacgactggtgtctcagccgcctctacccactggccgactcgttgcaggagctctcgctggccggttgcccccgcatctccgaacggggcctcgcctgcctccaccacctccagaacctccgcaggctggacatctcggacctccctgccgtgtccaaccctggcctcactcagatattggtggaggagatgctgcccaattgcgaggttgtgggagtcgactgggctgagggcctgaagtcagggccggaggagcagcctcgggacacagccagccctgtccctgcctagcctttagccctgtccccactcacgtggcttctcagcgggctgcatggaatgtctggtagctcaccacacttctggcttccatttgtcttcactcaacgtcagggtgggggagtggtgctggccaatcacaggagagagcgtgagttcccagtatttattcctggctgcccttggctaaaggtcacagctcctgtcaccctgtcaggcagccctttccatgcccctgttcaggcctggggaggtaaaggctcaggctgttagtagccgcagagagccacactcaccttgtcaggagactcttctcaaactgtccttatgtgagtgcactgccatttcttgcagggaccctgactgacacaggggctactactgacactttacagggatggttctcccccgtgcagggccgctgtgcccactgcaggacatgcagcatccttcgccccactccactcactaaaggccagcgcaccccaggccccatagtattgctggttatggatttattgactttatgttccaaattcagctttttcagttggctgttttttgaaaggggataagctttgtcagtagagggcaccgaacaggcattataggaggaaaggcgcctccttcgtggttcttgttggttgtgcttctgcctctggacgccgcagtgcatgtggcttccccagcacccagctcctgaagcaccaggcggtcagcagctgcccttggcaccctccagccctcagaagttgcgtaggagacacagcgcctccactgaggcacctctctgggaataacgttccccagcaccccaaatggatttccagtcaattcagaagcattttaccagtgaagccctcattattccagttcactgttaaagccagtaattctctatattaaactttccctgttcggtttatactccggagtataaaccgaacaggattatattatctgaagctccccttttgggcggaatgtg

SEQ ID NO: 735295 - DNA, 188427 bp, Homo sapiens
ctccaaggctgagggatgaggagacctgctgaggacccagggccttatctttccatcccactccataggtcccagtattgactgatgctgtcttcacctcctagcctcacttttaaccttctggcacccgcccaccactgtccagttcactattgaagccctgccgtccagtgctgcagagggaaaggatgttcttctactggcctgcaatatttcagaaactattcaagcctattattggcacaaggggaaaacggcagaagggagccctctcattgctggttatataacagacattcaagcaaatatcccaggggccgcatacagtggtcgagagacagtataccccaatggatccctgctgttccaaaacatcaccctggaggacgcaggatcctacaccctacgaaccataaatgccagttacgactctgaccaagcaactggccagctccacgtacaccgtgagtgattcccccatacctctgggtgctggcggtcagttctgcttcacacacatgagattgtcaggcctgggctgtgcctgcatccccctctgcattttgtcccgtgttgagatttgggcatttagtgcaggacacacacatggtaggtaaacttcaacagatcagaattcctttcctgcatccaggccctgcagacactgatggcgggggcgggggggcctcagcagggggaggtcagtctcagccaagcaccccatgccctccccatgaacctgaccctgagaaagaccctggagaactgggtcagggcctggcctgagggcgtcctgggaacctcacaaaagcccagcctcaggactcctgactccgtgtgaccccgggaagcctgtgtcagggctggggtgtggtctcctgggcagggcttactgggagcaaggatttaccagatgtctgcgggctgtggttcctgaagcttctcatcagtgagggctcagctcccagagtctcatctagacaaggacagagcctaccactttccctgggactcagcctggagagggcagggggacaggattactagggcattggccccctgaatgaggagcttaagagatgcccttgggcagtcagtggcccaggggtaggaacagaggggagaaaatgttcctggcagcttcttgtccaccggggatcatgcccaggggtgctctcccatggaggcaaataacagatgctgttgatgtgaacacctcctctgtgccaagcttcatgtcagatcctgtgaataatttaaagttcattcacagacaaagtggcaagcctcagaccattttccatttacatattgtatggaggggaaactgaggcacagagagatacagacaccggccacggtgggcagatcgcagctggcagagtcacatgagggctgtctgcagctgctgccacgtcctctccttcatccctggtgccttactaggtgtctgtggaccttagaacagccactggttcggatgttttcttcttaggtgtctacagctcggagggggagattctggtctggagagttatgagtaaatacagaattaatcagttttttcttaactaaatcacctgcctcaacaatcagtcagtgctggggaagttcaggcctcctcgctcaggtccacaccccgcatctctggacatgaaatggcttcgtgtgttttctgatgtgtgggtatcattccaacaggaggataaaggggaggactttgctttctctccccattcacaccctgcaccagccagggcccagtgtgagacacatactccgtagttctctcatgaaggagggagggaatgaatgaaggaatgatctataacctcttcagagacagagacctggatacaagatcctaggaggttctgggcccaacgtgagacacacactctgtagttctcttatgaaggagggagggattgaatgtaggaatgatctataacctcttcagagacagagatgtggatacaagatcctaggaggttctggccacacctgttttctgtccctctagagcctaagacccatgtctcattcatctggcccgtttctcctaaatctgcccctgggagctgagtctcatctgaccctggggctgcagggctgtgggaaggttttcaggggagggatcaggcttgcgggtagtcccacacgtttgccttacaccctggagctctacctggttctcactatgaatatcccataataatcccccctatcctttctggggagtagaaaaaaagtaaatatttaaaaatatgccagagcatctgttcttcttagcaagttcagatagttattagttagcaggaataaatcgttattttaccagagcctcacctgctgggggtttatgggagcctaactgactgaggggggtgggaaatatccaactccagccccctctagccatcatgtcccacctaaaggagagaaaaaactgagaggcacttgtgacattcacagcccagggcacagactctatccaggaccacagaacccctccctccccccactcaccaccgcatcactgaacgcctgctcacccaagttcctgttgcccagtacatcatgtcctggctttcaacaaaaactacaagacagactagaggcaaaaaaaaaaaaaaaaaaaatgcagttcgaaagacagaacaagcatcagaaccagatgcagatgtggcagggatgtggcagggatgttgaaattatcagaccaggaatttaaaacaactctggggccaggagcggtggctcatgcctgtaatcccagcatttgggaggccgaggcaggcagatcacctgaggtcaggagttcgataccagcctggccaacatggcaaaaccccgtctctactaaaaatacaaaaaattaggcaggcatggtggtgggtgcctgtaatcctagatactcggaaggctgaggcaggagaattgcttgaacctgtgaagcggaggttgcggtgagcctagattgtgccactgcactccagcctgggcaacagagcgagattccatctctaaaacaaacaaacaaaaaacaatactggctaatatgctaaaggctgcaatggaaagcatagacaatgtgcagaacagacggatgctgtgagcagagagatggacaggctaagaaagaataacaacagctactatatctatctatctatctatctatctatctatctatctatctatctatctatatatatgtatatatatgctagagatcaaactcactgtaacacctggatctcagagtggttgtgaggatgtttattaggagattaaagagattaaagcagagttatacacagggcgagagctcaactgatgctatcaactagtattcttatttttttgatgttgttattggcaataaaatcaggaacaatgcagtaaaaatttggttttatcatgtacgagttctgtgaccttccttgacttactgaggtactgtaagtctcagattctaactctgcagatggcggtgatgcccctctccctcaaggtgatgtgaggatgagatgagctgtaggtaggttggtgcccactgtgcctggcacatggaaggcccctgaaaatagtcaatgaacatcatccccgctcatcagcatggagttgacagtgagggctcgctctctgtgacaatcatggaatggaaaagaagaaacaagaggaagactgggcgcagtggctcatgcctgtaatcccagcactttgggaggccgaggcgggcagatcatctgaggtcaggagttcaagaccagcctggacaacatggcgaaatttcatctctactaaaaatataaaaattagcctggcatggtggcacaaacctgtaatcccagctacttgggaggctgaggcaagagaatcgcttgaacttgggagatggaggttgcagtgagccgagattgcgtcagtgcactccagtctgggtgacagagcaagactccatccaaaaaaaaaagaaaaagaaaaaagcaacagagggaagaggtgtgacatgagaggaagaagggatttaaaggtacaggagcagggcgaggtgcaagcacctgtgggagaatgtaggagttggtacatcccagtgtgtcaagtctgagacacagaaaatggtgcaaccgtggagagcaagggagtcagctatgaggacagcccaacagaccacactcaggctctggagcatttccttcctccctgactatgcccctgccctgcaatgccccttatggtttcccttggaacaaacttgggccttgtcccctttgccttcccctttctgcagaaaacaacgtcccaggccttcctgtgggggccgtcgctggcatcgtgactggggtcctggttggggtggctctggtggccgccctggtgtgttttctgcttctctccaggactggaaggtaccgcagcttttccccagcctcctcccacccctaggctgaccccagtcagggaggagggagaccccgccctgtattcagggccaggctttccgcatcctcccaaggaatccttccctctcattccatggctcctcccttgccagctgctgatcctaggctgcctcttcctttatgaatgtggcacagttaaggttgcacccctgagtgctgtcctagttccctaacacagcaaagccacagctgcctggagggaggaagggagggagggagggagggagataagacgggagtgctcagaacctggtaccttctgctgttcattgaatttacccacccagtgaggagggatttgcaggcttgagatccatggtgggggtcctgggcatggtcacgcagtggggagtggcaaagcctggacaggctgggtagggtcagcaccccatcgtgattgatgtccctgaggtgtgagatgggagaacctggacctcaggacctgctgtcctttatgtctcttgccaaggggtggagagagagaggacaaggccattgccccatttcagcatctccaggcctgaaaggagggtctggccatggcagggatactgagttctgggagaatatgatacatgctccttgcctccccatgcccccagctcccccagtgtcctgcacacacagccggccctgctttccctctggggccttgacccttcctctcaggcaaacgcaggtggtctgattccctccctgagtcctcagtccctttcctgggtccctgggtcaatgttctcctcacccggcatctgcctgggggggtccttcctctctggccaggacagacgtgactgcttaaggcctatcctcagctccccgtcctcggccgctcctaccacgaaactgatggagacaggaggccttcactccagtccttgaaaatggagtcccttccttgtcctttattctgcccctaaacctgtgatttctccctgcaccctcatgaataatcctgacctttcctagggccagcatccagcgtgacctcagggagcagccgcccccagcctccacccctggtgagtgtcccttcagcccaggtgtgggagcccctaggcctgccctacggtgtccactcctgccagtcaccccctgggggcctctgaccctttctttggggctgcaaggaggatgtcaggaaacatgacacaggggaccccgactgtcttgttcagactgatctgtgggctctgggtcgtgggtcacctcctcgacctcagctgctcaggtctcccctgggaagaggctccctctccctgattctctgggagctgaggacccctacactctcctgcaggaggggcccaggctctcctcccaccctgctgctcactcctgtctctgtccccaggccatggtccctctcacagatccaccttctcggtaagcctgttccctccccagcccttttctactggggtcccaacagtgcaggctcagggcagggggaccatcaaccccacagcacagcactgacccacctttccccagaacagtcaggtcaaagtgagtgcctccagccaggatccgggcctctctacagggccaggaccacccacgccatgtgctgacccctccccgggaccctctacacctgaggagaaccctggagtccagcaggtgcagaatggacactgggaccatcagtcagaggcccacattaacaagggtgcggggtgggcccagccaggacaggggtcagggtgttgtgtccacactgggaggctgagctcaggggcagagctggtcaatcctgaggggaaatgagtggaagtggaggcagggaagtaagtcctggccgatcagagacaggaaccttccaggctgggcttccgtgaccctccctccctgtcccctgacatctcctctctcccctgcccaggcccctctacccagccccagaacagccactcccatctatgaggtgagtgtgggccatggatgttctggtcccgcaggctccaggggacccaggatctgcccccaccagcacctggctgagctcagattcaggaaaatgcagtgaaaatgagaacaggtggtggtgagcagaggagggaggggcctgggaacagggaccccctgagcacagccaggttcagccccagagaagccctgggtgggcccagagcctgggagatgccagacactgttctgagaaggctacaggggttgaggcctcttctctgtttttacaggaattgctatactctgatgcaaacatttactgccagatcgaccacaaagcagatgtggtctcttaggttcctctgggagctgctcttgtgggttgatggagcgtccccaaagctcccagccctggggacggggaaggacatggagcctgagccagagaaccagctctgagtcctgaggagacacaggcctggggacagggagggatgggagtccctgctgaatatctggagaccctgacaggttgccctgggctctgggtgggccgggacaaaggcctctcatcaccacaggaagcgggggcttgcaaggaaagtgaatgggcctgtggcccacccggggtcaccaggaaaggatctgaataaagaggacccttcctctcattggctctttttctgctcacgggaacttagcagaaactcacctgaaactccgtgtccattctctcccgggtcacacagggaaaatatctccaccttgtctcaaccacagtctctcttccctgggaggcagaaataggggttgggagtcaggctggggtgggccctacacaggaaagggcaagattcacatgagccctgcccagccagccgagcgctcagctgtcctcacactaccccagggaccaaggccatgcacagccccagcctgggtccctctgtgaatgcatgtggggtctcaggagcacagaagatggggccatctgatgtccacaaaaggtgagcaatgcgggagcaaccatgggtggtataggttgcggctgtggcccctacgcagcctccagtgtcctgacccctgctgccctcttcacccaggccctggaggcccagtctatcactgtcctccacaaatgaacttacctgtccccaaatccaggatcctgtgtgcttatacctggccactaggttctcctctgtcccagtggctactgctcaggacatctttatccctggtggggcacagagaggggctgtcagagcaaccaagattaatacagacgcataattcagtccttgagcactacccaggactctggcccctcattgctcatcagttcccactttaccccctggcatggatctcactgagcaagccaactctttacacaggagcatccaggtcagaggtgcaggactcccccatctaaagctcatgcaggctcccatggcgatgggacaacctgtctgctcctctccctggcccacagccctatctcgcctgcagctcctccacacacctgggacagcagttctcagcccttccctgagggcccctggaagggtgatgatctcatataggttcacttgaaccaggtgccaccttcccacaagtgagctggtgcctgcactaaagcacagagccacagttcccaagagtgttctgccactgccacaggtcccaagagtgttctgccactgccacaggttgttcgtcctgagatgagaggtaagaaaacaacccgcaatgggttgttttatatcgggatttgcatcaggatttagctctaaatgacccctgatcccacctgcacacagcgtcagatgagacaaggtgaggcctctttagttttctgttgaggctgtgacaaattaccacaagcttagtgacatagaaacctgaaccaaagtgcccacatggctgtgttctttctagaggctccagggaagagtgcatttcctctccttttccacctcctagaggcctcctgcaaccttggctgtgtcctctttctccatcttcaaagccagcagcacagcatcttgaaactattctgtgccctgcttccatccccacatctccacctcctcccacctccctctctcacttaaaaggaaggagccttgtggttattttggacgcacctgggataaaccacaacaacctccccatctcatgatccttcctttaatctgtaaagtgtcctttaccacgtgacatgtccacagatctggggatgaggatgtacacatctttgagaggcccttgttctgtccatcactcctctcaaggccatcttctcatcatcgttcactacaaactacacatgggcacctggatgggttcatcatgactgtggcgtcagttcctgcattaacatccccagcaccctccagatcctgagagagggagacggagggctctccatgcccctagtacctctccaccttcttcttggtgacatgcttagttgctaagaataacagaaagcggaggtgactgaaagatcacaactcaccggcccttcaatagttcgtggacatcagcaccacggacagtgactcagtgaggctaatttccaggtggcagcagggagcatgcagataggagggaactgcaggaaaagctgcccattctattctatatgagaaagagtgtaagaaagaggaagctattacagggataatgctattcttctctaatccataaattgcgaaacctttgcatgtctggatatcatggtttttagcacatctgctgccactccctgcagggctgattgctgcatccaggatgtggtctcttggggggctcacagcctgctttggcctcatggtgagtctccctgcccctgacactcaggccactgtctctgcctacaacatggtgggaaccttccatgattaacgtctgattctctgtgcctgacctttgaagcacatccatcactcagcctggagcatccgctgagctcagcatcctgctcctccatccccagctgagcccttgaggagatgcttgagaggatctcctgggctcctctgtgagctcctccaggctgagccttgtgcttggtgtcagaggcctttgccatctgcttgttctttccataggcaaataatcctcctcagggacaagtggggcctgaagatctgtctgaatatctatctatctatctatctatctatctatctatctatctatctatcatctatctatatgtatgtatatatgagaatgctttattaggcaaaactgcatactatgaacatgctttaaaatgcaacaggatgagatgtgaagacataaagaacaagtgtgtagtgacacatggctatcagaacacactgaagaatccacaccgcggccgagagcagtggctcacgcctgtagtcccagcacttttggaggctgaggcaggcagatcacttgaggacaggtgttcgagaccagcctgaccaacatggtgaaaccccatctctactaaaaatacaaaaaatttagccgggcctggtggctcatgcctgtagtcctggctgttcgggaggctgaggcaggagaattgcctgaacctgggagacacaagttgcagtgagctgagatcgcaccactgcactccagcctgggagatagagtgaggctccatctaaaaacaaaacaaaacaaaaagaatccacactgcttccccgcttcactttacccagaaaaggaatgttctaggccacttcctcttcagcacacatccccagggaactaaaataggttcacagtcacccccatcttcctcattcccatcacctcttacccacagaggcatctctggtcctacagatccagccctgccttcaagaggcacaggtccaacccatccagtgtccctgctagtcacacacagcactcagggtacaatggagggcttctgtgctttggatgggaacaaaccccacctcacattcccacacctgagaagccaccagggtcctctctgtcctgtcctcacactcaatgtctgtcctgggtcacccttgtcatctctcctggaaataggcatggctcctgacaggtaggattgaggctttgtcttttcaggagtccctcccactctgagcacatgaaactgctcagctccatgcaaccctctctcaccaggggccttgttctctgggtccctgaatacctgggtccatgccatgtacattttaagaaaaatgacagtgactctcaccctgacatcctcacccaaggcacgtgtctgacaagaatcaccaggtgagatacctgtggctccacacacctgaggcttcactgcgcaggggtgtcctcatccctctcctcccacccctagggacagtaagcaccacaggctgccttggaccaccagctccccctcccagacacagcctcagatctatactgacatgctacatggagaggctctgatgaacagcaggtattaggaaatcccaccgaaccaggtgccacttgcggccccactcctcctcatatctgtgactgggacagacacacataacacacctctgttcaccgcccagcccccaaggtcaatcacagtctgcttctcccctagatccactgctccccatgtcttccgtcctcagctgcatcctgggtggcctccttgctgttcttgtaccccagaggcaggttccaacctttgtgatgttgcctgcaatgcccaaactttcccttccccttccccttcccttttcccctcccccttcccctccccttcccctccccacccctatcccttcgtcttcccttgtcttcccttcccttccctataaagccaaacatacccatccacctaccttgtggtcaaagtcatcagcctcctgctccactcagtgttctctgaccctgcatatggaggtggtggcccctcctagaacacccaccactcactgtcagccttgcgtggtaatcacagattttgcaggggttacctgtgttcaggtgtgtcacctgtggaaccagaactcttggaaggactggcagagggagctgcttaggatatctcagggctcctggcatctggtctaccacagggctattaacaacagcacttagggacaaggtggaggatggacggttaagagggtaaatatggatgatgtgtgggcaaagaataggacacaggaacacatgcagtactcaaataattatgccaagaaaggtgaggacatggagatggacattcccatatacttctgatgggactgcagtttagtccctacagcaacattgacctcatcatgtttaacgcgcacacgctctgaccactatcctacttctgaaggcctccctgtgctgtgagctctgagaaggccaagcttgcctgttctgtctctgctaaagccagagaccagccaatagcccagcacagggtacttcataaatacatgttgaaggaatgagctccaggaacagtactccacatggtagagatgtgtgtatgaggatgttcactgcagaaggtcatgtcaatgtgacaagtgacgagcagcctcaaatccagcaacaggggtgtgggtaaaagatcatagtgtagccatgcaatggaaccaatgaaaaaaccacaattagagcaaatccacatgtattaataaaggaggtgccctccatacatgctgcacctaacagaatgttgccaaataagaatgaaaaatgatgatatttgggctgtaaaaactagaagtcagctaaataagaatgcatcgaaagtatttgtgaatgcttacaattttataatgccttggcatccgttttggatggaagttggactttctcataccagaagcagggctcagtcacctttgaaatagtttccagttctccacctccttccagttcctcagtgtgattgatcagatatctgatttatacaactgcctcctggtgacctcctccctatgggacttccggatacagcccgtatgactgccccactgaccccacaccctgcctgctgcagtgaccacctctaattacctggatctcatgtctgcttgcattaaatccaccaattaaaactccctgaggacaatctgtttgaataatattctgtaccctaataaaggccttgacccatgggttccccctctgtcctccccatactgcccctgacctctgtgtgtgtgtgtgggtgtgggtgtatgtgtgtgtgtgtgtgtgtgtcctccagacagggcctgtatcccccaggacctgtaagtaataaatctttattttcatcttatgtctctcgcaatcattggcaagagctctgcatcttaaagatcgcaaatttaagaaattggtgtagtcggcacaatagagtacctcttctgtttagcacaagatatctcggagctgctgaggcttttaacatcctcgccggtgtggctgcctcactggtgaggccgttctgttcagtgcaattcagttgctccactgtgtgctgctgtgttgctgctgtagagtgctgccatgttgttctccccaaattgttaccgagtaggaacctgtaatgtgctcccaaggtggtctaccccatgagaagggggattctccatctagggcaagggctaggtgtgtttctggaatcctaatagggaaggcatccacagagggtgaactccactcctccttagagtgaggagtgacatttcccatttattttccccatggaggtgccatgtattgactttttctttcactgtcccaaggttgagccaaggtgagctatggagaccagggcaagataccatttctgttagcaaagcaaatgggtgacaacgtgtggagaagctgtggttctcctgatggatatagcagagtgccatttagtaaaatcttgtcaggaggctgcccctggttagaccggcagtgtctgtagtcactaaggtggatgcgaattttaggccctgggccatggataatccctgcagacacagccgtggcttcatgtgatggggcaatcccgggctagtggctcccttgtttctgcatttcttgctgtggttgcacaatcaacacctcaggggttgattgggtcaccttggaaagagaaacagctgcctaggaggctggtgcacatggaggccaccctcaattttattctgctaacaagttgtaagattaaaacaacagggggctttgggtaccatcaggaacttgtcaagtaaacatccaaagacagaaagaagaaaaagaaaaagacattaaccgtctagaaatacaagccattttaaagattttgcttaaaagatgcgcttgggctgggagcggtggctcacacctgtaatcccagcactttgggaggccaaggtgggtggatcgactgaggtcaggagttcaagaccagcctgaccaacatggtgaaacctcgcctctactaaaaatacaaaaaattagcagggcatggtggcaggtgcctgtaatcccagctacttgggtggagaatcgcttgaacccgggaggcagagacggcagtgagccaagatcgcaccactgtactccagtctgggcgacagagtgagacttcatctcaaaaaaaaaaaaaaaaaaaaaaaaaagacgggcttgtttcgtcgttgtggagtcatcccagagagaggctactccctagagtcactgaccacctttcctcctccatcttttcctcttatcattctagagacagaaaacaagaatctcagctttaggtggctaacctcaccccccaagaaaagaaactaccactttgattgactacaaatccaagaaaaataaaagagaaactttaaaaagtactgagcaaaccacaggtctagcaaacataatgctagccctaggttacttattcatttacaacaaacccctagatataggaggaaaaaataaaaggtaattaaatatatacacatacaatattttaatataaatatataataaatagttaaattatgtatgtataatatgtaactaaatcaaagtaaaatttcatactttgattctattggaaattcaaaattcatttattaacttatatattaaggaatttatgtaaaaaaagatttttaaaagggcaccaatttgcttttgtgtctctacaacataggatctaatttaactttacatttgctaaatacactaattgacaaatattcatggatttaatcaatactggggctcaaattgtagccacacgtgggaatcccataaatttaaacactctgtccctattatcttgagaagaaaactaaatataaaattgaaaaaaacaggtatgtctcaatttacctgtaactttgcctaaatttcccggagtcatatacccattgctgtaaaacattctctattggacataggtgctctgagacaataaataaaatagaagtgtttttggtacttagacattggcttgacaaaatgggatcccatgaaacctcagttaagatagtgaatacggcccaatgtgagttgaaatggggcctttaaggattaaaacttattacatgaaacctagtaagtaatggggtgattatccatactgcttctccatttcatagcccaattttgacagttgtcaaatctggaaaaaacaaacaaacaaacaaaaaaacccctgggaatctgttgcctcacagagacacaaagtagacatcaaaattgtatatctcagttccagttccaaaatggtggcatagaagcaagctggctttactccttcacacagaaaaccaaaaacaaatatacagcaccaaaattattaccagatatattccagaactcaaatatgaaaatgaaacagttttcagagccacagagaagtgaaaaaaactcccgacagatgacaaaagaatcagatttccccatctgtaatgtccctccctgccccattctgcctggtaccaggtgtgtggaaaattttaccccaactcatggtttctacactgggaaatgtaagatcaatgcgggcaaccagtttctgcacaatcctgggttccctgtccctgccttaacccacaagaagcattgtgagtgcccgaagggagaaatttccctgaggacagtcaaagagtggggaggcaggactaccatctccttccctggaaactctgctgtgtaactcagccaagggagacatgaaatcagactggtgtttcagcagctccatgttgtagtaggtttgtttcacaggtatcctgggcatggacatctagccagctttcccacactgccaggatatcccctttgggacctccctcagttaggaagggcacactctgatcatttactagggccaaggtaaaccctaaaggtaacttagagatgaaaaggaggtagtgacctagcagtaaagaactctaagaaaatctatccaataaaaatcaaaacaagccagacaaagactaaaataaataatgaatccttcaatgtaaagacctggacttacatccacaagaaacagtaagcaggtaaccatgatctccccacatggacaaagtgaggaacaagtgactgatcctgatgagatggtgatgtgtgagctctctaatcaagaattcaaaactgcagttttaaggaaactcaatgatcttcaagaaaacatggaaaagcagttcagaaatttatcagagaaatttaacgaagggattgaaataatttaaagaaaacaaacaggaatcttggaattgagaaatatatttgctgaacaggaaaatttattagagtctctcaacagcagaatggatcagaggaaagaatcaacccaaataagactcccccaaggcataaaataatcgaattctcaaaagtcaagggcaaagagaagattttaaaacagaaagagaaaagaagcaaatggcataaagaagctccaattctgtggcaacagattttcagtggaaatcatacagaccaggagggagtgacatgacattctcaaaatgctgaaaaaatattgacatttgagaatactttatccagtgaagttatccttcaatataaaggagagagaaagtttcctagacaaacaaaagctgagataattcacaccatcagactagtcttcctgtaaatactaaagggtaaatactaaatacttcaatgtgaaagtaaaaaaaaaaacactaacatgcaaaacaaccacaacaacaataacaacatttgaaggtataaaatccactggtgaaattaagtacgtagacaaacccagaatactcaaatagtaattgtggaaagtaatccaatcataactctagcatgagtctcaaaatataaatctatcaaaaacaataatacattttaggaggccaaggttggcagattccttgaggtcaagagttcaagaccagcctggtcaaaatggtgaaaccccatctctaccaaaaaatacaaaaatttgcagggtatggtagcacatgcctgtcgtttcagctatttgggaggctgaggcaggagaattgcttgaacccaggaggtggaggttgcagtgagctgagattgcactactgcactccagcctgggtgacagagggagactctgtcttaaaaaaaaatagctacctgtttggagaaaggtaatataaaatatgtaaatagagacaaagtcaaaatttgcaaaggatgaaattaaagagtagagtttttttggggggttttctgtttctattattttatttgtgatctaagataagttgttaccttttcttctcttgaagatactttgttatatctatgtttttggaagtcttatggtaactgcaacgcaaaaaatctatgatagatccactgaaaataaaaaacaatgacttaaaacatactaccagagacaatcaaccacaaggaagacagtaaaaaatgaagaaaggaagaggggagttacaaaacaaccagaaaacaggcaacaaagtggcagtagtaagttcttacttaaaaatattgaacactgaatataaatggactctattctccaattaaaaggcatagagtggctgaatgctgcctatatgctgcctacaagaaaccacttcatgtaaaaagatacaaatagactgaaagtgaagggggtggaaaaagatatttcatgcaagtggaaaccaaaagagagcaggagtagctatactgatatgagataaactacaaatcaaagactataaaaagagacaaagaaagtcactatgtaatgataaagcgctcagttcagcaagaggagatgccaattataaatatctatgcatccaacacttgagctcccaagtctcccaagtatttaaagcaaacaatagtggatctaaaaggagagatagactgaatacaatattaattaggggactttaacaccctgctctcagcaatggccagatctttcagacagaaaatcaacaaggaaacttcaaagttaaactacacactagatcaaataggcctaactggcatttacgggacatttcactaactatctaactgttacagaattcacattattttcatcagcacatagaacattcttcagaacagaccacatcttaagtcccaaaaccagtcagaataaattcaaaaaagtttatatcacatcaagcatttgttctgaccacaatggaataaaactacaataaatgaataactttctggacacatacaacctaccaagatggaagcatgaaaaggcagaaaaacccaacaaaccaacatgaaactgtaacaaaaggaaaacccaggaccgaatgacttcactgctgaattctaccaaacatttaataagaactaaaaccaattctactcaaaatgctttaaaaaattgaagaggatggaacactttcaaactcattctacaaggtcagcattatcctgataccaaaaccagacaaggacaggacaaaaacaaacaaacaaacaaacaaacaaacaaacaaaaaaacactacaggattgcttgaggccaggagtttgagatcagcctgggcaacatagtcagaaccaatctcttaaaaaaaaaaaaaaagaaaaaaattagccaggcatggtggcatgtgcctttagtcctagctactcgggaggctgaggtgagaggaccaattgagcccaggaggttgaggccgcagtgagccatgtttgtgtcactgtactccagcctggggaacagagcaagatgctctctcaaaaacaaaaagcaagctgggtgtggtggctcctgcctgtaatcacagcactttggaaggctgaggtgggagaactgcttaagcccaggagttcaagaccagtctggacaacatagggggactccatctctcaaaaacaaccaaccaaaacaaagccaaaaaagaacataggccaacatcactaacaaacatagatgtaaaagtcctcaataaaatattaacaaaccatgtttagaaacacatcaaaagagatcattcactatgattaagtgagattcatcccagggatgccagtatggctcaacatatgcaaatcaataaatgtgatccatcacattaaagagaaccaagaacaaaaaccatataatcactccagcaagtgcagaaaaggcatttaataaaagaatgggttgagggagtggagcccatagtcagagcagcagtggtctgggattttggaagtagaaagaagggcagcaccactggccaggaccaccagggaacacccccataggccctgggtgttgtgctccagggagggttccctctggagttattaatcttggtgtccactttgcccagctgcccctcacagggtcagggaggatgaagggaaagcttccttctaatgaaagttcagggactcacagttcctagagcctgtagggagaggaagatcttcgaggaagagcacctgggcattggggcgtttgagaggaagatctatgccaggtccaagtggacaacctgtggactctctctccagggacatacgggtatctgggaatctcctgtagcttaaagaggtaaagacctctccctttagcctgaggactggaggatgctggttcaggtgaatgagtcctgcaggggctggtacaggcctggagggtggtggtgtccagggccttgggttcacccttagcatgattcaggccgggcggtgtttcacatgagcaagagggcctgggttcattgcttcaggacaatggtgaaatctcatggtggaagaaatcttgtccttgccagtgcccagctttcatttggtcttggcccagagtgtcctccctagagaagactcttgtcccttcttcacactgcccttcagggatatgccagccttatgggataagatggggtggagactgtagatgtgggtgggaatctctccacagagtgctccttctctcagcggttgcaccttgtctcagggcttcagcttgaaatctgggatctccaagcccttccctccccagtcctggccaggaccacatgggcagatgcattgtgtgaagtgcatttcatttggggtgtcctctctgcatggcaccctcccgttgattctctttgcgcatgtcagagtgcaggcaccatccacacctcctgctggaggagggacggagctgttgactcctgagagctgatcatgtgttcccaccctcacacacaatcatggtccatcctctgagggacatgtgttgccaccactgtggagatggtgcaactgacagtaacaaacagtaaaatctggtactgaatgggaccttaagccaacaatgacaatgtcattccaaggtgtttcatttttattgattcaatgcaagtcacctgatttcattgactattcacaatagctcgataaagtaaatgcatcatcaccaccactttaaagaggaaaaaggtgcttgggcagtttgtgactactgtggtggctgctgcattgctctctggtaaagccaagtaggtggtgggtgcggcctctgggctgggatgatccaccctcctggtggtggcaggggagccaagctggagccatggcctgtgcagtggtagcagctgaactgaccgctgctgcaggatttgcaagctgttacattttgcgaagccatgaagcacataaaacctcaagtagaacaagtgtttcaaagtctaccaaaatctgccttcagagattattactacagaggtggatatgaacccaaaatgacaaaacgggaagcagcattaatactagataatgaatgaacactagtaatagtagggtaagccctactgccaataaagaaaaaaataagagatgctcattaacatgttatgctcttaaatcacgcagacaaaagagggtctccttatatagtagccacaatcaatgaagctaaagatttactgcaagatcaagctaaaaacagtaggtgtataatgaatttttaacttcatattagtttatgtatatgaatatcaagtttttataataaaatgcctccaaacaaagaatatttgatttagggtttaataacttctaagaggggactcagatgtttcctgtttcacagtcagtctgagagggtcatttttcctggagctgacctgggtggaggcctcacactgatactccccagcatcctctctcctgatggggtttatgctgagcatacagtggccctgggacagctccattctctccatgagtcacagacgctggtcatggaagatccactggataaggttccagagtcatctgtggggcaggtcaggatcacaacatccttttcttctgtgactctggtgttgctgactcagatggggtcggagccactgaccctgtggacaatcagtggaggtgctcaactgaaagtgggctgagggcacgtcttctcctccatccctgggtccttaaggtaactgtggaccccagaccaactgacacaggagctagaaagaaattatttaggaagttagtgagggtaagagcgtccttggcaaggtttcccctttaacaaaaagcagcccaagataattccttttctaacaaagagcagcctgaaaaattgagctacagatgtagatgagcaagatggaagcttgcacaggtgaattccagtaggtgtgccaatagaaaagggctgcctggaagccaggtatgttcaacatggagactccatcctcccttttctccattaccacatgtacagtaaaaaaccaggcaacatggcaccggccaggtagacaatccatctgcatgacaaaagatcagagtggggcagccagcaaatggcacagctggtctaaacaatctttcaccccctgtataaatcagacactgcctcctgaagctcatctataaaaccttctgcatttcactatggaagtggcaacccattttccccaggacccctctctctgtgcagagagctcttctctttctttcccctatgaaacttccactcttaacttcactctgggtgcctgcatcctagttttccatggccatgggacaatgaacctcgagtattaccccagatgaatgatgctgtttcacaatcactggttcagctcccttcttcttagggtttcacagctcggtggggagaataccacgcctcagtggtctggggagtgaggaacaaatgaagaattaatcagattttacttagaacgctatcacctgcctcaaccatcagatccatgttgggaatgtccaggcctcctctcttagatctatacccacttcactggacctgaaatcctgtgtttcccgatgtgttggtgtcactcctatgagaggataaaggagagaactttgctttctctccccactcacaccctgcacaagacagggcccaatatgagacacacactcgctcagtagttctctcatgaaggagggagggagtgacctcgagtgattctgccatctgtagtctgtgtaccctggccagtggctgtatcttcatatgcctcagtttcccctcagtaaaataggacacacaatgagaactaaaaataaaattctaattccccagtgaactgaaaggatggcctcttggccaagcggatcccagagttcctgatcatgacaggatgggaggttacacctcattacagcccctccctttggaagtttagaggtgacaactgactagcattaacgctaaaatcgagatcatgagactgacagaacagactctctgtggccataagataccaaattataaactcaacctaaggtcatgcaggcaagggctaagccacactttcctacatttaaagaataagctatgttctaacacagaattttctttctctctagcggctaaagtaacactagccttcgagataagcaatattgaaatgatcgcggctcatccaccaacactggctaactgacccctgttccaacagccacaactacacttcaattggacaggagactgatttcagtaactttctcctaataagagaccactgagcatggcctggttctgctggtatacagacacggtgcactgagtaccataatgcttgtttcatcttttgatgtataagacctaatttaatacatttaaatctgaattctccaccccaaagtgaacatggggtgcatgtagcatgcatgtttgttgatcacgcatgtgcgtgtacttcctttgtgagtatccatagctccacctataacctgttgaatatgtatacctggccaactcattcagcataaatctatcttccacattcccctcccttgaagtgcctgctattggtctctgctggaggctgcatcttctaccctggggaatggccagcctgcaggctgtaaccctgtgtaagaaataacctggttgggtgcagtggctcacacctgtaatcccagtggtttgggaggttgaagtggtagaatagtttgagctcaggagccagagactagcctgggcagcatagcaagatcctgtctcttaaaaaaattttagggaggagagtgaggatcagaaaaaatacctattggctattatgcttagtacttggatcatgaaataatctgtataccaaacccctgattacatatataacaaacctgcatgcgtatctttgaacctaagataaaagtttgttttaaaaactatctgggtgcagtggtgcatgcctatagttccagctactcgagactgaggtgtgaggagtgcttgagctcgggggattgaggctgcagtgaattatggtcccacctgtgagtagccacttcactcaaacctgggagacagagcaagaaccggtctctaaaaaaaaataaaaatagaaaaataaaatgaaaaatatatgaaataaagtctcctttccaaacgtacagatctccgatttttctgccaacaatgataaatggtcagtggcttgccatgttgtctgtgaattacttttaaaatattcacgatcacctgacctaaaggttggtaccaaggaaccgcctgaatacaccgtctctgattatttgcctccaacagagtgttccctgggcctgatctctggtggacaatgagctgctgggaacatcctctcttctctattcctcccctggggatgctgaccttcccttggagtctcctaagttccccagggcagtcggctaatgtcctagggagcttacctgtcttctccataccaagtctcatgtgaaggacgaggctttgcccttgcccagatgaggctctgggggctgagccctggctggctaccagctgcaagagccatggcccttggacagctggtaaatccttgttcccagtcagccctgcccaagatgcctcaacccagccccggcacaggcttcccagggtcacatggagtcaggatcctgggacaggggactggacaggggtttccagggctgagtttctgaacaggggcttcccaggggtcccctcactccaggatctgacatggtcctacaaggaacgtccatggggaggggacccaggagggggaactgacactgacctccccttactgagcctccccccaaccccatcagactgtccttcctctgtagcaagtgcctgcagggtctggatgcaggaaagaaattctgatctgtggaagtttgtctcccctgtgtgtgtcttgcactaaatgtccaaacccccaaatgggatgtaatgtagagggggacacaggcacagcccaggcctgaaaatcctgtgtgtgtgaagcagaactgacccccaacacccagagctcatgagacatcactgtgtacgtgaaactggccagttacttcttcattcacaagatctgtttttatgacttgtagggtgtaggatcctgtgtcattgttggtgacattctgtatcagcagacatgtattggggtatattgtctctcagcctctgtggcaggtcctggggtaattacttgagttcctagtacatatcctgtaattcccctttgtaccagttgtagccaagcctaaggcagattgtgggtgagtggaagaatctccttgccttctgcagcttcaacagtgacttgggcagtggtaggcaagttccagaaagttaaaagtgaggctaggagtggggagagagcatcagttaatactgggccctatgcattgaggtggaaagatggggccctaggtcctggacaggtctcttcatccctcagccttggagtgtgtgtgtgtgtgtgtgtgtgtgtgtgtgtgtgtgtgtgcgcgcgcgcgcgtgcgtgcgtgtcctactgggccaaggtcagcagcatgacctcccttccttcagtgcctctgaccttggcatttccctgtttggagtccttttccccaggggtctgcctggctccctccctactgccttcaggtcctgctcacattagggcatccttgggagaccccttccctgacacctctagagaccctgggtcttccctttctgacctttcgctgctgtgttccctccagggctcttgtcaatacttgacctcacattctagatacccttgcatgtctgtcttcctccctatgagagcatgagctctgtgagaacagggacttgtgtgatcttggttgcaccccagtgcctgggacaggctgcggactcctgtggatgagctcatgagtgttcccagggcccttcacaacgtgggatttattttccaatggctgaggttgttggctaagagctctgttggagttcaatcaggctggtgggaaaaatattagagatagttatagagatagacacaaatcttcttggaagaccaaaaagtttgcataactttggtaatagatctgactgaaggtggtccctttacctttagttaaacaaattaaagtagtaacaaaggaaggcagagtagtttgtctagccagcttgtttactcatgtgatcttaagactaaccattgatgtgccacaggtgcttaattgctttctacttgggaagtccacaatgtcaattaccctctaacggtgttgactcaagcctttgttaattaatcttactgaataaatatgagtctcactagctgatcaaggccatggtcacaactgtttataggactcagcagggagtctgtaagcggccctgacagactcagctggactggcaaagcaaaatatgtgtgtgtcagtgtacactattcacccgtcccccacagctggtgcccctatatgaggagtgctgccacagagctctgtttagtgtcccttgttttttttcttgagtattaccccaacttaaattgtgattattgtcatctgttttcaacattaactgctcagtgatgattcacttggaaaacattaacaatcgagattgtttcttcactaacaacctcagattatttagattttcctgttgtaatcccttcttcctgtttagtgtccaacagaagccctctgtccctctcaggtccccgttctctccaagaaaccccagccagtctctgtgctccctcctcccatccactcccagggagccctcccctcacctgtgagcagaagcgcctgccagggatgtgcactctgtgaggaggggctgagggaggccccatgggctctgctgtctgctttgtcctcctctgtggagaggagcttgggcttcagaaaataaggaggccagaaagtaaggaacaggctgagaaataatggggatgtgtcgaaaggtcacagatgccaacatctttgtcctatgcaatattatccataaaattacaggtttgagatatgcttaaattttcttctaacatgcattaaaataaacatataacttttaatagttatattaaattgtatttaatataaattaaatgctcttgtcagagctactgtgactgtcagctctgctgtccttcctctctctgtgctaagcctcctcccagggcagaagcacttcccagggccaggggtgggggcggggaaaggtaagtggcaatgaggatctgcacaggtagcctttccgcctcctcccctctcagtcctgcctccttgtcttcttttcctctttttctccaatctacatttcagttccttagaccacgctgtgagaagcaaggcttattgggacccccatcccttaacaggatgacctgtgctccccataagtgacctctgctgtgtctagggattggctctgtcagcacctcacagagagtccctggggcccccaaactcagtgttattttctctatgacacagaaacccctctgggtatgcaaggttttcctcatgttttctaatgtctgggaaggttggatttactcccagcagggaggtcacagagatgtccagggagtggggtcctagaaatggacaaatctagagctaaagcccaggtctacgattttcagttgtttttttctgcagtgctatgtgaccctaatttcctaggagtaactaaaatgcaaacctcagacatttgtagacattttatgatttttctctacagcttgtaccactgttattattatttgctttatgctttttcctaaataaatttactttacaaaacatccttgtcctagtagggtgcaggggctcacgtctgtgatctcagctgcttgagaggttgaggtgggtggattgcttgaggacgggaatttgagacaaaacatctttgtcctatgcaatattatccataaaattacaggtttgagatatgcttaaattttcttctaacatgtattaaaataaacatataacttttaatcatcatattaaattgtatttaatataaatttatatacaatacatttttatataataaattatatatataaatgtatatataatagtttttcttttttgagatggagtctggctctgtctcccaggctggagtgcagtggcacgatctcagctcactgcagcctccgccttctgggttcaaacgattctcctacctcagcctcccgagtagctgggattacaggcgcctgccgccacgcccagctaatttttgtacttttttagtagagatggggtttcgccatgttggccaggctggtctcaaacacctgacttcaggtgatatgccgcctcggcctcccaaagtgctgggattacaggcatgagccaccatgcctggcctatatattttatataattatataaagttttctataataaattttatataataatatataaaatggatatttatttaagataaagttattagttttatatatttacatatatttaggaataaatgtgttactgtgggagcccagtgcccaggcaggtagtcagtacatgatggttgtcattagggttaatactttggaattctggattttttcccaagagagtgtctacgctggaatattgggcttgtggctttctgctgatgtgcatgtgtgaagaagctacttccacttattaggacttgtgtatctgtctcgcagtttcactacctattttctcgtgatgttggtcaagtcgcctaacttttctgtgcctcatttacctaatttgtagaatatgggtaacagtacacaagtgtgagtgtgtatttcccaggactgaccactagagggcgtgaaggcaccggcacttactattacagcaatgggtgtagtagtgctcatggtcgtaaacatcattctcccatgaaaggaaccagggcttcctgggagaaataactgattccagggctggggccggaaagcacaagcggagcctggagcatctcgtgaggccagaaagtaaggagccggctgaaaaataatggagatctgtcgaaaggtcacagatgccaaccagaaggagctttgaatgaccaattttgagacaaaatgagcactataagaaataatgatagtaataaattccaacccataaatacccatgagttcctactaatataaataaataattgaatacataaatatataaggatgaagaaacagctttttcttacagcagaattccaattaatgaatgtagaaggaatgatcaaatagaaaatcactatttggctaacagcacagtcaattgtttgtaggcaagaattatcaatggactttaaatatgaatgggtaaaagtatgatgatgctacaactagtgagtaccaagggggaaaaaaaagtacgttgagaagaaacaggctacttccatattcccaaagtatcacttcaggagctacttattgattataatgggacaaatagtaacttacagtagagaaacctggcaacagagtctctccgaggtacaaaggctctcttcaggaaggaggtaaggggaaggaagaagaaaacactgtcctgcctcaattatttgctttccccattctcaagtgtacttcatagacattcaaagatatgtgttgatagtgtccacgatccacatggctctattatagtcatttattcacacatacattcagtgaggctttgagtgcctaatgtgtgcctgatatttgctagatggtggatgctgagaagatcaggtgtgctgctgtctctagggtgactgaatccacctgccccactttacagatgtggaaattaaagtgaaaaggatttataggattagttcactgtcacaaggtcactagccttaaagttacaggagtaaagcaagtttcctgacttgctagattttctgctgcaggtgctgacaatggtgagctccaataggagagaggacactcagagtgaagtgggagccctgaacaccctggattagccaagaggacatgccgggtccagctgtgaccgcacaaaggaccattggggatatttgtattctctttttcacttagagcttgaaatgaggaaaactaagtgcagaaaaccaagagtggaagatttttcacaaagcactggtaacatgcatcagaaaaccctgtgctgatgtctgtcacggtgtttctcactgaacggtaatagtctggctttgagtgtgttccctctacagcctggagttctgcgaggcagggaccaggtgtgattcatctttgtctctccagtgacagtacacagcaggctctgataaatatttcttacaaaataaaatggaataaaaagtagacatctgcacaggtgtgggatgactgagcagcagcagaagcaggaaaagtcagcgtccccagatcagctgatgtggtgttcggattctagataggggtgaggtgccaggatggggatgggggtcctgtggctctgctgccctgggggacacccctaggtttcacagtgcctgctgtggttgctgcactttgcttccccatgggaaagtgatcagagggtgtggggcttcaggtgaccccatgtgggaaatggccaagggaaggtggggtgggcggcacatggttttttttaaccaatatttgaaggtaggttgtatgaaaaggtgttaggcttatttcagcttatggggagtaggacagggattggtgagtgtgtatcaggtatattttggctcaggatggaaaagaactgtcacagtaacataaggtcttttgggaaattacatgtttactggcagagttcaggccagggctgggtgtctgaaaatacctgtcagggtcacttttatggttacaagggcagagcttggcttggaaccaggtttcttactaataccacatattaagtattataaaaactgtcctttgcaataggacattgctctatgatgcaggttgaggtccctctgtttaagtaattgtgggtggctgtgattctctcatctagtctgcgacttggacttcacctccatctgcagtccctctcctttgctgttgacactggtcagagttaagcgcatttactgacgatggtcacagggtggcagcactgcctctctggtattttctaaaacctcttcctggaactgagccagtctaagaggatgtcatgactaagaaaagggcactaatgaggtgaacagataattttttttttcttgtttctcctgtgaagtaacagagtggaggtgagcatggaataattgccttttagaaatggaagacaatggagagaagtgtttcgcaaaccttaatgtgttcacagatcccacacagatctttttattcaatacagattctgatttttctggtgaggcctgagattgtgcatgtctaaggagcttttggatgatgccattgctgctggttggcggaccacactttgagtagcaaggctcgaagatcatttagaggttaattctcactgcatctaatttatggatgaaaacaaaccaaggtccagagagagcatatacagcttgcctaacaaagccattccctaagtgcctgacttcttgcatttaaacccagggcttcagcctttgtccagttctcactccacacatcacacggtttgttcactgttgtgaacgacagttgtggcagcatctctttagtttaggaatccagagccccaatttcactaccctctttggtcttggctcatgctgtgacttcgaatagttttgcccttacttaaaatcttcagtggctcttttgtaatcacaagatcaagttcgaatatctctgtctagtgttcatggctttataacatatggtatctctttagtaaccttacctaacttccctgttttaaaattgtctcttgctgccatagccctccttgctccttcctgctccctaacaaactgtgttcacttctctctcagtggtagtgatgatggcatggcctctgatgttagactcatgtaacttctaatcccagatccaccaccaacattggcaagttgattcatctttctgaggataagcatcctcctctgaaataaacttagatggcggttgagaggggtaaataaaataacacacaaacccactctcatccctgagaccctcttcaaaactagcatataaaaatagctatttgaagaggttcagtgaaattcaaggtaacacagagaaggaattcagaatcctatcagataaatttaatagactgaaataatttttaaaaatcaggcagaaattctgtagctgaaaaattcaattgacaaaccgaagaatgcactaaatctttcaacagcagaattgatcaagcagaagaaagaatttgtgagcttgaagagataatatatgaaaactcagagtcagagagacaaaagaaaaaagaattaaaagaataatgcatgcctacaaggtttgattattaagctactcaaagagatacaagagaagggtgaaaaccaacataaagaaatgtaaaaaacaatcagaatataaatgaaaaattttctaaaatgctagctagtttttttttgagacaggctcttactctcatcacccatgctggagtgaagtggcacagtcatggctcactgcaggctcaacttcctgggctcagatgattctcccacattagccttccaagtagctaggactaaaggcgtgtgccaccaggccaggctaattttttgtatttttagtagagatggggttttgccatcttacccagggctggtcttgaactcctgggctcaagtgatccaggagattcactgccaaaaaggatataaccaagtcatatagtcataggttatctaaagtcaatgtgaaggcaagaattctaagagcagtgagacaaaagcatcaattaacttataaaggaaaacctatcagtctaacaccagatttctcatcagaaaccttacaaaccagaaggtattggggtcctaatcttttggcttcttaaacagaatagctctcagccaagaatcttgtgtagagtgaaattatatttcaaaatgaaagagagaaatacagtctttttcaggcaagcaaatgcttcaggatttgtcacggctagaccatcctacatggaatgttaaagggacttctaaatcacaaaacaaaagatttaaatagaacagaatagaacctcttgaaaccaaaaaattcaaatggcctataaaacaataacacaataagaaaacaaagtagataacgatcaacatgatgactggaacaaatattaacattgaatgtaaatgacctaacactccacttaaaagacacagattggcaagataaataaaaaatcacaaaccaaatatcagctgtcttcaagagactcacttaacatgtaaggattcttatagactcaaggtaaagagatgataaaagatattccatgcaaatggaaaccataagtgagaaggaatagctatccttatatcatataaaacagactttaagcaacaacagtaagaaaaagacaaataaggcaactatataatgataaaaggatcaatcaaacaagaagatattacaatcctaaatatatatgcacctaactttggagctcccacattcataaaacggttatgatgagacctaagaaaaaagatcaacacaaaacagtgagggtgtcctgggttttctttttattggacagcagtgtactagcctatcactttcccagtcaggggatttttggtctccccattcccctaccatgggttcatgccaaagtccatattttttattagtgtttggaattggattttttttttttgaggtggagtctcgctctgttgcctaggctggagtgtagtggcacgatctcggctcactaacctctgcctcctgggttcaagcaattcttctgcctcagcctcctgagtacctgggactacaggtgcatgccaccacacccagctaatttttgtatttttagtagaaacgagatttcaccatattgtccaggcttgtatagaactcctgacctcatgtgacagggaaacaggcactcagtgaacttcatgcgattgaggagttaatgataatgagagaagggctgtgaggggacagcactggggacaccagagcctgtgacgggctgagttgctgtgccttgggagatgcccttttgactgagccctgggaaggagggggtgtgggggcaggagctgcctgcagagggagtggcctcaggtgggcggccacctggctgcagggaagaggtgacagagttcgtgtgcagagcttggagggtgaggaggaggtgggttgaggtgaccttggtgagggtgaaccatggggggctgtgggccctgctgagggaggccagccagccctggacctacagggtggtttggtcttttttgtcccattcccagcatccactgagtggtgaaactctgcaggccagggaccatcccactggccagaaggagcgcacagtaggtgcccactcagtgcatgttgggctggacagaacctcactctgccccctgcccccagctttgggagctgcagcaaggtccctccccctagggatctccatgcctctgtctctgaggggtgagatggggagacttcaaagggccatctcagagtgtgggggatagagacgcagaagtgtgggggatagagggaggcctgggctctagacccaaaggaccttacacacctcctgagtcttttcaaatggtttcttctgttactttaaaaatgatgtaagtcatcatatttattgtaaatcccaggaatctaatcatgcgtaaaataaggtgtcttatccttgaccccaccccttccccaattaaatttccaggatgttaccactgtttgcagttggtgtgaatctctctttaataatactctgtttatctcacttgtcgttttacgccaaaatacccattgaattatattattgctgaagaccattcttttttttttttttttttttgagatggattcttgctctgttgcccaggctggagtgcaatggtgtgatctcggctcactgcaacctctgcctcctgggttcaagtgattctcctgcctcagcctcctgagtttctgggattacaggtgcacaccaccacacctggctaatttttgtatttttagtaaagacagggtttcaccatgttggtcaggctggtctcgaactcctgacctcatgatccaccctccttggcctcccaaaatgctgggattacaggcatgagccaccacacctgcccagaccattctgttctactgaatcatgtgtggtgggcacctcttatatcaatacatatggattttatcttgtgtttgttattggctcccctttttctcattgcatggctacactcaatgctttgtccacacccctgttcctgggttggaatcttgtgacagaaaatgaagtaacaaaggctaaagctttctaaagtggagtcaggagattgcaagacaattgcactttcaccagcaagagctcaaaccacagaatgttccaatagatttggataaacagctgaagtcagtattcaccagccttcaacatctcaactaggagaaccctaaaattaactaagcacatagaatggaatggacttgtgatttaggattccttctcagccaatgagctgcttctgaaaacaactttttgtggaaattacctgtaaagaaaaccctctcctgtgcttgtcttacagaacactagtcagggctgccctgattcagtggacccgaattgctattatttgtttcctaaacatatggtattttctgtgaccttcatctcaatcttttttttaagttactgggctgtttcccagttttcataatgacgagacattctgcagtgtttcatacacatgtcttttccccatgtggagtattgatccaggagctcattcagtcaacgcatgtttatgaagcatcctgtgccaggctgtgggctggtcactgtcttcagcagagagaggacaggcacagtcttgccttcacagagctcacagctcagggaggctcttagaagtgggatactggtcggagcatgtgcacattaaacatgatgaggtcaaggttgctatagggactaaaccacagtcccaccaagatcgcattgagttcctgtggtagaccagaggtcagggcccctaagatgtcctgagcagctccctctgctcagaagttttggttccacaggtgacacacctgagcacaggtgacccctgcagaacctgtgattaccacccaaagccaagagtgagtggtgggtgttctaggaggaaccgtcacctccatgggcagggttggggaagactgaggggagcaggtggctgatgactttggccagaaggtagggggatgggcaggtgtgcgctcatagggaagggaagagaagggagggcattgcaggcaacaacacaaaggttggaacctgccttcatggactgagaaaagcagggagtccacccaggctgcagctggggagggaagacatggggagcagtgggtctaggggagaagcagactgcgattgaccttggggactgggcagtgagcagaggtgtgttatgtgtgtctgtccccatcatagatatgaggaggggtgaggccgcgggtggcacctgggtcggtgggatttcatagtgcctgctgttccctagagcctctctgtatagagggtcagaatagatctgaggctgtggtctgggggaaggggctggtggtgcttaccatctctaggggtgggaggagagggatgaggatgcccctgagcagtgaagcctcaaggtgtgtggagccacagttgtctctcattagacatgtgttttgcgtgaggatgccagggcctggtggttattactgttgtcaagtttgcatgacaaggacccaggtatccagggatccagagcacagggcccctggtgaggggatgaggctcagatggggctgaccaggttcatgtggtcagagtgggagggactgatggagagacagagcctcaacccctcctgtcaggagctgtggctatgtccaggagagatgacaaggatgacccaggacattgagtgagtcattgagacattgaaggtgaggacagggcagagaggaccctggtgactgctgaaatgtaggatgtgaggagggctctgacccatgcaagttacaggacctccccacccccgagcccacagatgacccttaaattgggcatcctgagtgctgtgtgtgcccagcagggacactggataggctggacctgagtctctgtaagggcagcgctggtctgtaggaccagagtcttctctgtgggtgtgacgtgggcaggaattagcaagatgggggtgacaaggcttggcttggaggatctggtacagaagcccatgggcttggtcagctcagcttctcaggggctcagctggggctggaggagcaggatgctgtgctcagggcatgctccaggcagcgtgatgtgtgtggttccagggtcaggcacgggggtcaaaaattaaccatgaaaagttcccaccttctgtaggcagagaaaatggcctgattgtcagggtcagggagacttaccatgtggccaaagcaggctctcagcctcccagagaccacaccctgggtgcagcactcagctctgcagggtatggcaatagatgtgccaagaaccccaacatccagatgcatgcaaaaattttgcgatatataaaatagagcagatcaagtttccctgcaataacgttgttcctggttgtgtctttttcttgtaaactagacatggacatctttccagcagtctgttctcatctgccaccttcctgctgcagcacctcagaatgaacattcctgagacactgtccgtggtgctgacgaccaagagctatggaacagagtgtgatgtagaatcttctagttacctctgctctcctttcacttttaacaacagagcatcattaacaatgagaaggtggagaggtgttcaggatcttgaagtgacttctgtcttgctctcccataaccctgaagctgctgtagacattattgcagaaactgacaccacagtcaggatggccttgtccaggagcccatgtgcagtttgtagtgagcaaggatgagaaaatggtcttgaaaggggtgatggacagaacaggggcttttcaaaaatgtcacatcatcacccccagcatccgtgaatctgtcacatggtaagagaccttacagattaaatgaaggattatgagtttggaagattattgtagtttatccagatgggtccaacataatcacagaatcccttccttacaaatgagagagggaggtgggagagtcagagaaggaggaggagatgtggggatagatgcagaagacagagcggtgtcaagatgctgcactgctggctttgaagatggagaaagaggacacagccaaggatgcaggaggcctctaggaggtggaaaaggagaggaaacgcactctgccctggagcctccagaaagaacgcagccatgtgggcaccttggttcaagtttctgtgtcacttagcttgtgggaatttgtcacagcctcaacaggaacctacagaggagtcaccttgtgtgcaggtgggatccagggtcatttacagctaaatcctgatgtaaatattgcaggttgcttttcctacttcctatctcatggccaacaaccctggacaatggcagaacacccttggaaaccacggctctgtgctttagtggagggaccagcttgtttgtgggaaggtagcacctggtccaagtgaacctacatgagatcgttactctccccagggccctcagggaagggctgagaacagctggcccaggtgtgtggaggagctgcaggtgaggcagggctggaggggcctgtgggtccaggtagaggggcagacaggttgtcccatcgccatgggagcctgcacgagctttaggttggggaaccctgctcctctgacctggacgctcctgtgtggagaggaggcttgctcagtgagatccacgccagggggtaaattgggaactgatgggaaatgaggggctagagtcctgggtagtgcctgggaggaccttgctcaaggactgaattcttggtctgttcccaccttggttactctgacaacccctctctgtgtcccacggggataaagatctcctgagcagtggccattgggacagaggagaacctggtggccagagctaagcatccaggatcctggatttggggacaggcaagctcattgctgggggacagtgatagatacggcctccagggcctgggtgaagagagcaggagggctcaggacactggaggctgtgtggaggtcacacccacgatctgtaccacccatggatgctcctgcattgctcacctttgtgtggacatcagatggccccaacttttgcactcctgagacatctcatgcattcacagagggacccaggctggggctgtgcatggccttggtctctagggtagtgtgaggacagctgagcactcagctggctgggcaggactcctgcgaatcctgccctttcctgtgtagggtccaccccagcctgactcctaaccccctactcctgtctttccagggaagagagactggggttgagataaggtggagatatttttcctgtgtgacccaggagagaatggacatggagtttcaggtgagtttctgctaagttcccatgagcagaaaaagagccaatgagaggaagtttcccctttattcagatcctttccaggtgaccccgggtgggccataggcccattcactttccctgcaagcccccgcttcctgtggtgatgggaagccttcgccttggcccacccagagcccggggcagtctgttgaggtctctatatattcagcagggacccccatcccttcctgtccccaggcctgtgtctcctcaggactcagagctggttctctggctcaggctccatgtccttccccatccccagggctgggggcttcagggacgctccatcaacccacaggagcagctcccagaggaacctaagaagccacatctgctttgtggtcgatccagcagtaaatgtttgtgtcagagtgtagcaattccagtaaaaacagagaagaggtcttgacccctgaggccttctcagaacagggtctggcatctctctctgggcccacccagggctactctgggactgaacctggctgtgctcagggggttcctgctcccaggcccctccctcctctgctcaccacctcctgttattttcactgcagtttcctgaacttcagctcagccagatgccagtggggacagatcctgggtctccctggggcccaagggaccagaatatctgtggcccccactcacctcatagatgagagcagctgccctggtgctgggtaggggaatctgggcaggggagagaggggtgtcaggggacagggaaggattcctgctgtgtaggaattccagggctctcctcaggtgatggagggtcccagggtggggttagcacagggagtggatgatcctggccctgaacagaggcccagctcatggccagggcaggtctaaccttatccaagtcattctgggtagggtgggtttgtgctggggattgacagtccccctgccctgagcctgcacagctggggccccagtggaaatgggattgggaacggacagtcttacctaggagatggagctgtcagagggtccatggcctggggacagagacaaaagtgagcacgagagtgttaggatagctgggcccctcctgcaagagtgtgtgggggtcctcagttcttagagaattggggagagggagcctttctcaggttattttaggggtcaagtaagcaagtgaggttgaggaagtgacccatgacccagagcccggaggttagggctgacccggccagttggggtttcctgtgtgatgttttatgggatcctctttgcagccccagggatagggtcagaggcccctgggtgtaactggcaggagtggacaacttggggctggcttagtagttcccagccacacccagactgaagggacactcaccgggggtggaggctgggggctgctgctccctgaagtcactctgatcgctggccctaggaaaggtcagggttatttgtgaaggtgcaaggttaaaagtcacaaattggagttaaaataggggaccaggaaaggagcctatttccaagaggggtatggagacctcctttctttatggagttctgtggtaggaggggcccaggtgaggggagttgaggaaaggccttacaaagccacatctgtcctggccagaggggaaggactctcaggcagatgctgggccaggagaacattgatccagtgacacaggaaagggactgaggacccagggaaggaatcagaccaccaggggttgcctgagaggaagggtcaaggcaccagggggaaagcagggccaggcacatgtgcaggacactgaggggactgcatgcatcttggattctcctggaactcagtgtccctgctgtgaccagacactccactcagggctggagatgctgaaatgggacaatgatcttgtcttctgtctctgccctttggcaagagacataaacgacattccaggatatgccatattggggccccggttctcccttctcacagctcagtgtctgcagttaccatgtcagtcaaaggggtgctgaccccacccagcccgtccaggctgttccagtctccactatgtgataatgcccaggatcccccctcagatgccctctcactgggtggatggattcagtgaacagggggaggtaccaggtattgagcaccgctcccccctgctccaggcagctgtggctttgctgtgctaggaaactaggaccatgctcaggggcatggccttaattggactgaattcactgaggacaaagctgttgaggaagcagcccagggtcagcagctggtgaggaaggtgccatggaatgagagggaaggatccctggggagtcgggaggctggggagagcctggcactgaatacaagacagggtctccttccttctcgcctggggtcagcgtgaaggatgggagcagaatggggaaaagctgtggtacctgccagtttttcggaggagcaggaaacacacaagtgcagccaccagaagactcccaaccaggaccccgatcaggatgcctagagtgttgtcatctgctgaaagaagaaggcaaaggggatgaggtccaaatctgttccagggggaaccatgaggggccttgcagggcaggggcatggtcagggaggaaggaaatgccatggagcctgagtgtggtctgttgtgctgtcctcatagctggctcccttgctctccgtggttgcaccattttctgtgtcttaggcttgaattactgggatgcatcaactcctacattctcccacaggaagcctgcacctcatcctgctcctgtgttttttagtccctccttcctctcacatcactcctcttccccctgtttctttttttccatcccatggcagtcgtaaagggcaggcccttgctgccaactcaatgctgatgagcagggatgatgttcattgactgttttcaggggccttccacatggaaggcacagtgggaatcaatctacctgcagcttttctcaccctcccattgccttgagggagaagggtatgtgatattgtgaaatacgtatttggtgttcatcaccattgatatggttaggctctgtatccccacccaaatctcaccttgaattgtaataatccccatgtgttatgggagggaccttgtgggaggtaattgaatcatgagggtgggttttttccatcctgttcttgtgatagtgaataagtctcaggagatcagatggtttcataaagggaagcttccctacacatgtcctcttgcctgctgccatgtaagacatgcctttcaccttccatcatgattgtgagacctctccagccatgtggaattgtgaatcaattaaacctctttcttcatacattaccaagtctcaggtatgtcttcattagcagtgtgagaatggactaatacagtaaattggtaccagctagtggagtgctgctataaagatacctgaaaatgtggaagtgactttggaactgggtaacaggcagaggttggaacagtttggagggctcagaagaagacacaggaaaaaagtttgaaacttcctagagacttgttgaatggttttgattaaaacgctgatagtgatatggacaataaagtccaagctgaggtggtctcagacagagatgaggaacttcttgggaactggaacaaaggtgactcttgttatactctagaaaagagattggtggtattttgcccctgccctagagatctgcagaactttgaacttgagggaaatgatttagggcaactggtggaaaaaaaattctaagcagcaaagtgttcaagatgtgacttgggtactgttaaaaacactcagttttatgtatttacaaaggtatggtttggaattggaacttatgtttaaaagggaagcagagcataaaagtttggaaaatttgcagcctgatgatgcaatagaaaagaaaaatccattttctgaggagaaattcaagccagctgcagaaatgtgcataaacaatgaagagcaaaatgttaatccccaagacaatggcaaaaatgtctccagggcatgtcagagaccttcctggaagccccttccatcacaggactggaggcctaggaggaaaaaatgtttcctgggccaggcccagggctcccctgctgtgtgcggcctagagacttggtgccctgcatcccagccactccagccatggctaaagagggccaaggtacagctggggccatggcttcagagggtgcaagccccaaaccttggcagcttccatgtggtgttgagcctgcaggtgcacagaagtcaaggattgaggtttgggaaccttcgcctagatttcagaggatgtatgaaaatgcttggatgtccaggtgaaagtttgctgcagaagcagagccctcatggagaacctctgctagggaagtgttgaagggaaatgtggggttggaaccccgacacagagtccctactggggcactgcctaatggagctgtgagaagaagaccacaatcctccagaccccagaatggtagatccactaacagcttgcaccatgcacctagaaaagctgcagacactcaacgccagcctatgaaagcagccaggagtggggctgtaccctgcaaagccacaggggtggagcccaaggctatgggagttcagctcttgcatcagtgtgacctggatgtgagacatggatacaaaggagatcatttcagagcattaagatttggctgccctgctggattttgggcttgcatggggcctgtagcccctttgttttggccagtttctcccatttggaatgggtgtatttacccagtgcctgtacacccattatatctaggaagtaactaagcttgcttttgattttacaggcttataggtggaagggacttgccttgtctcagatgaaactttggacttggacttttgggttaatgctggaatgagttaagactttggggaactgttggaaggcatgattagttttgaaatgtgaggacatgagatttgggaggggtcgggtggaatgacatggtttggctcttcttcacccaaatatcaccttgaattttaataatccccacgtgttgggggaaggacccagtgggaggtaactgaatcatgggggtggattcttcccatgctgttctcatgatagtgaataagtctcacaagatctgatggttttagaaaggggagttcctctacacatgccctcttgcctgccgccatgtaagacatgccttttgccttctgccatgatttcaaggcctccccagctatgtggaactgtaagtcaattaaacctcatttttaaaaaaattacccagtctcaggtatgtctttatcagcagccaagaccagctcggtcgcggagatcctaacccagcagtgctagaggaattaaagacacacatagaaatatagaggtgtgaagtgggaaatcagggttctcacaggcttcagagctgagagccccaaacagagatttacccacatatttaataacagcaaaccagtcattagcattgtttctatagatattaaattaactaaaagtatcccttatgggaaaccaagggatgggccgaattaaaggaataggttgggctagttaactgcaacaggaacacgcccttaagatgcagattgctcatgctattgtttgtggcttaagaacgcctttaagcggttttccaccctgggtgggacaggtattccttgccctcattcctgtaaacccataaccttccagcttgggcattagggccattatgaacatgttacagtgctgcagagattttgtttatgaccagttttggggccagtttatggccagattttggggggcttgctcccaacagactaatacacccattttctggtatgtgactctaaagtccttagaatcttcaaagtgatgtctttttcaagctaataattgactgatgactggcagcccctaggcaacttcagaatgaggctggtcactgacccaggtaggattagagggttgggactttcagcctcacccctaatccctggggagggacctggagtttgaattaatcaccaatgaccaatgaatcaattaatggccaatgattgaatcaattaatggccaatgattaaatcaatcatatctatgtcatgaaccccaaaaggactgggtttgaagagctgaacccatggaagtttctggagtgtggtgcatctggggagggcatggaagctccacaccccttcccacatgccatgctctgtgcatctcttcatctgcatcctttgtaaagtcctttattacaaaccggtaagcctaagtatgtgtttccctgagtcctgagagctgtttgagcaaactaatccaacccaaacagggagtcatggaaacctcaatgtgaagccagtcataagaagctctggaggcccagacttgtgactggtgggaaggtggtggcaattttgtgggactgagccctctgctgatatgtccaggtagatagtgtcaggatggaattggaggacacctagctgatgtacggtgcagaactgattggctgctgggtgtgtgggagaaacccccccgcatcacatttggtcacagaagtgtgtctgtgttgatgattgttattgtggagtgagagcagaggaaaaacacagtttgagtttttccaaacagggtggaatcccatctgccaatttagaatctgaaacttatagtttcagtacttcaattaagattgaagtacttcaattcagtacttcaattaagattcagtacttcaattaagattcagtacttcaattaagattacagaactggtaagtgaaagtgatacaacaaaaatgtaaccaaagtctgctcaacttaacagctaataacaacaaagttcataaaaataataccagtcgatattgatagcactgattgagccctggctctgtgcatgaccttgttaagggctttaatcgcattaatctctgaataaatatcctcacaaccaccctgagatccaggtgtttgtaacaattctacagatgaggaaactgaggcccaggaggttgagtgtcttgcccaaggtcaaatacctggtacctattgtaaccaggatgataactggatgagtctaatccctgagttcttacccacattgctccccaggctctgaaggaatctcatccttctcattccgtgtatcattttacaccccccctccctcctaggaaaatatacaaggaaaggagtgagaggggccgagggtcactcacattttacagtcagcttgagggggtcgctcctgttggagctgactgggttggagacctcacactgatactccccagcgtcctcctgcctgatggggtctatggtgagcatatggttaaaccaggacagcttcatcctcttcgtgacctgcagacgctggttgttgaaaatccactggaaagaggttccagtgttatttgtgtggcaggtcaggaccacggagcccttctctgtgactgtggtgctgctggcttggatggagggctgagccactgactctgtggatagagtgaccaacagaaagtgtcttggggccatgctgcatcctcagagatctcagagtcaaatttagaacattctcctgtgaataaaggagaaagatgaaggacagggaggagcagagagaaccagagacacccatagcagcgagcagtagggactacagtgacctcagagaccccagggaccaggaggacccagctgcctcagaccaggaccagggagccctgaaaaccctcccacagatgagcggccccagagtcacatgagatgcaatacctggggtggctttaggagcaggcagtcagagaaatggaacatgggtctcagcccctaagggacaaggaagaggtgtggccagctcctcctaggatcctacatccaggacccagtctgtaaagaggttatgattattcctttcttttttcattaattccctccctccttcatcagagaactactgagtgtgtgtctcagttgggccttgtgcaggtacagggtgtagtgggaagagaaagctgagtcctttccttcatcctcccatgggagtgacatcaacaaatcaagaaattcatgatttcacgtccagtgagggaagaaatgtggatctgatgggagaggcttggacaatcctggcattgagtctgatagttgagacaggtgatttcgttctaagtaaaaactgactaattctccatttgcccgtcattcctcagaccagaatctccctctctgagctgaggatgcccaagaagaaaggagctgaaccaacatctggtcctggggtccacagatgccccacggtggtggccacgaccagattctgggctgcagacacacggtggtgtgacgttgagcactgacagcctgtgtgatgctgatgcaatttctctttaataaaatggggtaaatgtcaatggtccctggcttgccatcctctctgtaaattaacattaaaatatttacaattacctgacctaaagcttggcacagaatagctccaaataaacatcatctattattattttactccaaaaaaaaaaaaaaaagagttctctgggcctgattcctggtggagaaggagcggtccagagtgtcttttctctgctttccctcctcctgaggacagtgcacttcccgggacatcttttaagtttcccatccagtttaatggcctgggaagtttgtttgtctgtcctctccactctgactctcaggtgaaagatgaggctctgcccttgcccagatggggctctgggggctgagccctgcctggtgaccagctctaggaaccacggccctgggacagctggtaaatcgttgctcacaatcagccctgcccaggaagccacaacccagccctggcacaggctccccagggtcatctggagtcaggatcttgggacaggggcctggggcaggggcttgaagggctgagcttctctcagaggatcctcaggccaggccctgactgagtcctataagatctttctcaggtcatgtctatgaggaggaggccaagcggggttggactgagactgattttcccccgctgcatctcccgcatcagactatccttcttgctgtagggaatttccacggagtccggataagggaaaggaattctgatctgttatagtttgtctcccctgggtgtgtcctgcactaaatgcccaaaccccaacatgggacgtaatgcagagggggatgcaggcacagcccaggcctgacaatcctgcgtatgtgaagcagaactgacccccaacacccagaggcacggaggaatcactcaccgtatacacggagatggtgagatgcctgttcaatctgagaatttctgtatgtgacttgtagggtgtagtatcccgtgtcctctagggtgacgttctggaaatgcagatctccactgggtgatattgtctctcgaccgctgtatgcaggccctggagtcctaacgtgagtgtctattacatatgctgcgattagctggttgggctccaccgttttccctttgtaccagccatagctgtaaagattctcgggcagataaaccacagagagatgaacattctccccttcagcaacttcaaagggcgctgatgcaataaagagccaggcagtggtgggtgcgttccagaaagttaaaagtgaggctaggaaagggagagaatatcagtcaatatttgacctatgcattggcatggaaagacggggtcctgggtgcaggtctcttcacccctcagccttagagggtgtgtgtgtgtgtgtgtgtcctactgggtcaaagtcagcagcatgaccctcattccttcagtacctctgaccttggcatttccttgtgtgaaccctctttcccaggggtctgcatggttccctccccactgccttcagttcctactcacacaagggaatccctgggagacttctttcgtgaagcctcctctagagaccctgggtcttccctttctgacctttcccagctctgttccctccagggctcttgtcagcacctgacctcacattctagatctctttgggtgtctgtcttcccccccatgagattgtgagctctgtgagggcatggacttgagtgatgttagttgcaccccagtgcctgggacaggctgcagactcctgtggatgagttcatgagcgttcccagggccttccatatcctggggtttatttgctaatgtctgaggttggcagatgaagacagagtttcatgccctggtggtgtttttatttaaattgtcactgtgatatagttttactatcattttcaaaatgtagtggccactgacaatgaacttgaaaacatggaccaactgagattgttttgccccttggcaattccagttcacttagattttttggttctccttagacgctctctcccctgagtctctaacaaaagccctctgtctcctctcagagccccatcctccccaggagaccccagccagtctctgtgctccctcctcccacccactcccagggagtcctcccctcacctgtgagcaagagcccctgccaggggatgcattctctgtggggacaagctgaggggggccccatggtctctgctgcctgctctgtcctcctctgtggagaggagcttgggctccaggaacgctctagacagggttactgtgactgttgtctctgctgtccttccttcctctatgctgagcttcctctcaggcaggagcacttcccgtttatgggcaagggcggggctctgcctacaatgtctctctgtcccctcccctctcagtcctgcctcccttgtccctcctttctccttcctttttgcctatatttggttccctaggcaaaactttgagaagcaacgctgatggggtcctcataacaggacgacccactctccccagtactgacctctgctgtgttctggccttggttctgtcacagccggtagattatttccctttgtgacacacaaaaccagctgggccctgggtctcctcatgctctccagtgctccaggaaggcagaatgatgcccagcaggaaagtgacagaggtggctctgggggctagaaaggggctcactgggtgatggctgggaaggacccacccgctatcttcagtgtcaccagcctggcctctgacccagggacagagacccaggcctggaggtctcgggaggatccccagctcctaggtgtggagggaggtgtcctgtgtgtcctgggaagagaggactttgatggaaggaggtgggaggctctgggttctgctgtccttggtgaaggtttcagggggaccctctccatgtctggggtctgtgcccccagcttaactctcattctctttgcaaatacatatattttgtggatctgcagttgcctgaactgtctcatgtccctaaatctttgtatccctttttacagaaggtcaggaagggtgtgtacatgagtatgaggactatctgatcagggcgagtgtttgtttcccaaagatctctttagatatggtataatacataagataaatgtactgaattagcaattttaagtgtagaattaaatgatactaattctattcacaatgttgtacaaccatcaccataattttttaccagaaaatcttcattataccaaatggaaacttcatacttttaatcaataactccccacttccccctgccccacccactggtagcctctgatactatcaatctctgtgaatttgcctagtttacatgtctcatataataaggaattatatacgtgtattatttttttctggattatttctcttagggtaacacttttaagattcatccacgtcgtagcatatattacagcttctttcctatttatggctgagtaatatcccaatatatgtttatacctcaattttaattcattcatctcttaatggacatgtgggtggtttccacatttttgctattgtgaaaaccgctgcaatgaacttacacttggaagtatctgtttgggtttctgtgttcatttctttgggggtacatataggagtataaatatggggtcatgtggtagttctatgtttaagtttttgagaaacagccaaactgttttccagtttgctgtgctattttatattcccatcagcaatatacgagggttccattttctctacattcttgtaaacacttactatttaatattttttaaaacttatagccattctagtaggtgtgaagtgatagctcattgcagttttgattttcatttccctggtggctgatgaagttgagcattttttcatgtatttactgacaattttaatattttttagagaactatttattcaaatcatttgctgtttaaaaaaaatgggttatctttttattattcagttgtaatagttctttatatattttagatacaagtcccttatggggtacatgatttgcaaaatttttctcatattctgtgtcttctcactttcttcatggtgttctttgaagcacaaacatttttaactttgatgaagttcacttatctatttttaattttgttacttatgctcttgatgtcatattgaagaaaccattgcccaatccaagatcattaagttttactcctatatgttcttctaatggtttgataagttttgctattccatttaggtttttgaaacattttgagttaacttttgtatgggctgtgaggtaggggtctaactacactatctcgcatgtggttatccagttgttccagcacaatatgaagaggctaccattctttccccattgaggaatcttggcacccatgtcaaaaaccaatgggctgtaatggtgagggtttatttctggactcttgattctattccattgatctctatgtgcattcttgtgccagaagcacactgttttaatgattgtagtgttttagtaagttttcaaattaggaagtgagtcctccaatttttttttccagattgttttggccattctggggtgacttttaaaaaagatgtagttcaatggttctcaaagcaggagtggttcagctctccttttttggcagtctggagacctttttaggaccttaatctaagtagataaattattcccactttcttttctgagttgctatgttacagtgtatattgacacccatgaaataattgagagaccctggaagtgcttgcctacatagtgagggacaattagttccatgatcatgggcacagaagattttgttttgggaaacaattttgttggtggagttatattcatgcttactcttttatttgtcttcatagcctgcatctccttcagacttcatatctgtttattttcttgtttgtcctctggggtttgggtgttgggtgaccagtcagctggagctggaggaggtgcttagcaaggcagtgaccctggttgggaggagcagggctcagcagggtgaaagtagctgggccttgagtcaggagtggcatctggaaggcctgactgtaagggtcagaagggccagcaggtgggtgtcctaggcacaaacggtggctgctgctgtggactggaggaaggtaagaggccccgagtattccatgttcttactggctccccaactgaggattcctctcctgggctggtgctgtcctgcagcagggaggggttagacagggacggctgcacatcaggccggagtccatgtcatcctcttaggcactgtcactacagattgaggattctgttcataagccaagcctttgcacaaggaagggacccgggctctcaaggaagagcagctcctggtcagacctccatctccttctctctcattgcctgaggcctcaagcttggtctacctggcacaggggtctggatcctcctcccagggttggggtcttactgagctgggcacctgcaggtgggagaagatctggaggggccccatctgccttcaccagattgatgttgagggtccctgagtcctgcaccactatcaggtgctgagcaacttccagtgtcagtgacaaccaccccatggtggaagcagaaccacctcgtgagaaagcacctccaagcctcagtgcttgccatgtgtgggaatttgctggtttcagttgggggcatgttggtgggtggtcatgaattcagggccggattctatgctcacagtgcacatgctggatgtggtacagaccccaggcagggctcagtggggtggttttgggtgtgcacaggtatcttttctggaggagctggtggtgatttggctcccagaagttcctgagctctgcagactcaccaagcactcaatatttgagtgaacattgggcgagagagcagaaggtaagtgtcagggcatcggggttggtgcctctgggaagaggaggaacattctgggaacaaagctctcccccggcttacagggagcttcccatcgctcctgccttgaggatcagggaaactagggcctctgctcttccaggggctgcttgcaggcagtttgctctgggagggggtgacccaggagttgcctctcattttgcatttgagatttaaaaggagaagggacagtatatcttgccaggtcacaaaaattacaggcatcatattgactgaagggcactcctgtcatcactgcaatataccagaatggtcttttaaaaaaataagtgatttaggtttaccagcaactgtaatgcttgttttattcttctagttcaccgttaatgtcacttttgtagttttagcactggcaatgttgattttatgttgactctgatgattttaagctttcatttgttcacatagagatcatcttctttctgaatattaatgcattttttctctatttctactggttattcctgtacatagagtagagaatcacttttcccaaggaggtggaaagcttctgactaccaaaaaaaaaaaaaagtgtcaaaatgctttaaagtcagtaacttaaagatcaaatccaagagtgggcaacagattctgcccagggtctgaaaggtggagaggtgactggtgaggatgtttaaaagacctctcctctctactccctaaatgggggccatccagtgttcttgaggttcagagaaggcccagggctggggcagcagggcactgtcagctcccagctcccaggggccaggagtaagaccccaacactgtccagacactgattgcattcattttgggggagagtagattcttatttaaagaataatacaaaagtctacaaatatgaacataaacagaaattcctttgctacaattttccccttaataagacattccttcctaatgacatatgtgactgcattcatggctgagatgttttctaggatggtgagagcatcagagtggactatctggtgccttggggtcatgcattttcttcttccaatgtctacaggatcccccatgtcccactttgtagtgtaactcagtgtgtgtcattctggtttttgttgtatagatccttggaaagcccatgtcattcctgctgtgaggtacaggcagccaaatggcatcatctctaaacatgccttctcctggtacatcaaattatggaataaatgaaagccattttgacagatattgaagatataagtttctactcttcccacacatgcttctcccaagtgaaggattttactggtgaattgttattagagattagtgtggatcagtgactctgccaggggaaattttgccctctaggggacatttggcaaagtctggaaacattgttggttgtcagagctgggggagggagtcctgctggcattgagtgggtggatggtgctgaacaccctgcagttcacagagccccaccagtttgaccacccaaatgtcaatgctgaggagtggagagccctgctgtgccctcccgcagcttccctgaagcttcccctcacctgctcctcccatgtctccccaccacttccccacttcacccgcctccttacacctcagtcccctccacctgaactcaccccttagtccaaggccagccctgatctccgctctcctggtctccttgctccttagcaggaggcgcccactagatggcgcccttgcccttactggagctcaccgtctccctttccaccctgagacaaatgtggctgcttttactgccacaaccccagccctccacactctagatttgctcagggagcagctcctggacagacctcagggaccccagggaggagcctcactctggagattttgatggcatggtctttgaacttcactgttacccccagtcaggatccaggatgttgggagtgcatgattctgcccggtcccacttcagcaggaccccactgctgagttgtctgtggggacccgggcctctcatctccttcttgcattgcaggagagggatcttagcactgctttcacataaagtcagataatggaggagtgcaggtgagtttgggaaggtggacatgaagagaggttgtgtccctagaggtggcagcagtgagaggatgggcaggtgggaggaacacagcccatccagggttgccagccatattaggagcgacagcctttcctctaagcctccagcctttttcctgaaacattccagaactttccacttcagcacttcccactgaggctcctcaggtctgtccctgagctcccagctgagcctacctacccatctgaaatcctgagtcctgtgtcaccctcgttccccattattctgtgcagttctgtgggacgcccagctctcctgacacccccagtcttcagaatggccatcagcgctgtcgctgtggcaccagggtgactgccgcctggaggctgagtcctggcttcctgacagctgtggggcccgctctaggctcccttgtcctgatcattcatcacctccaggatgcacagcagctgggccagggggaggagcagggacaggtgtcagccaccctgtgtgtctgcaagtcaggctgggggtgtgggaggacgccaggaatgactgaactttctgatttagagggtgagagcttgcactgatggaatttgggatttaataggaaaagcatagcgttttcctattttgtaggcagggtggctggagtttggaatcatagattcccctgggatgtcactgtggacctcagtcccacccgttaggggcacagatttcagaatccacaccctggggcaaagcaggcatgggaggctccatcagcctggccagggctctctatttgtgcagctgctgcaaggagatgtgcactctgatgggaacagtgctccctcctccttggggggcagtatctagctccctgcagcccctctccctgcaggccctgccctctctgaacctcaccttccccaacccgccccccgcaatcccatctcagctgtaatcccaacactttctcatccattatgggtggactgcttgagcccaggggttcaagactatgctggctggacaatatagcgagttgttgtctctacaaaaagacaaaaattagctgtgcatggtggcatacacctgtagtcccagtcactcaggaggctgaggtgggaggattgcttgagctggggaggctgagttggcagtgagttgagattgtgccactgtatacttcagtgtaggtaacagagcgagaccctgtctcaaaaaataaaagtaaaaaaaaaaaaagaaatatggaatacattattgttaactctaatcaaccatgctatgcaatagtccaccagtaataccagtaatagccaataatgaattatctgaaaaagaatacaatttattcttagctatctactgctaaaatttttaagctatcttttatgatagctgaaacaaaagaagtaaatttaaccaaggaagtaaaagacctttataatgaaaactgtaaaacattgatgaaataaattgaaaaagacacacgcacaaatagaagatattccatgttcatgaattggaagaactgatattgctaaaatgtccttaccacccaaagtggtctacagattcaatgcaatttctgtcaaaacaccaatgatattcttcgaagaagtagaagatcctaaaattagaaaccacaaaaattcctaaaacctgcacaaaacaccctgagttgccaaagcaatcttaaacaaatagaacaaagctagtggcattacacttcctgacaatcaaagcatactgcaaagctatagtaaccaaatcagcatggtcctggcataaaaacaagcacatagatcaatgaaacagaataaaaatcccagaaataaacccatgcatctctagctaactgattttcagccaaggagccacatgcacacaatggggaaaggacagcctcttcaataagtggtgctggggaattggatattcatatgcagaagaatgaacctagaccctatccctcaccatgcacaaaaaattaactcaaaatgtattaaataaagacttaaatgtaagaactgaaactatgaaactactagaagaaaatatagggggaaaatccatgacattggtctaggcaaagagtttttggataaaatctcaacagcataagcaacaaaaccaaatataaacaaacgggatttcatcaaactaaaaagcttttatacagcaaagaaaaaaaaggccagcagagcaaagagacaacctacaaatgggaggagaatatatttgtaaatatatacatatatatttgtaaatatatacatctgataagaagataatatccaaaatatataagaaaattatgtttctgtatagttttatctgactgggatacagaggccacatccacagtcccatcctcaaaggccacttgttcccaaaatgtcaagcacatccctcaatgatccatcatcaacacctatgtctgtaggatgaagggtgaatcatgaagcactaaaaaggaagaaggaagccaatcccaaaacaaaatgatgcagggtctggaaagtccaaagcattttttttttttttttactgcatcttcctcctttcttctccacattcccaatcctcactattgattaacaaaacaaaaaaaactgggacccaccatcttccctactgtcaggagatctagcgagattgtttgagtcttagaccaaactttgccataagccaaatttctggctgactttacaatgatatgagctagcacagtctctttttctgccagtcaacttgtgctcggttttatttgcaaccaaatagaggtggtaaccaaatataggtgaccctaaaattagtcatcaggatgaaatcctaaaatgtgcaacaaactgggttgaattcaggattagtagcaacatctctgttgtgggcttgaaaagggggcacccttttatgcagtagcaaaattgctaaattgttgtttgctgagtctttggactctcatcccggattttctatgaccattcaaacagggctgcaatgaacatctatggttgtttagcttggcacacttctacatttctatatagtaatatctagaagtgcatttgctcaatcacaagatatgcacattttataattgactgctatcgaactaccttaaatagccttaatttgttctcaacattgtttaacagggtctgtttaatgtcctacgtccagcaaggacagtatcacttttcttaatatttttcaaattattggaccttaacaaatacttaatgtgcaattaattgattcctttgtattcccatgccttcttttatatgtttccttatagtacacaaaaccacattattgtttctttacttgtgtcattccaccctggaccattcctatctaaactataacattatgagagagagagagagagaaaacaatatgaaaatataaattgattaatcaaaaaaatttaaataggacaaatcaggaagacacaagagagattttaaaattattcagagaataccacaatagctgtaccaatatattttaaaacttagatgaaacggacaactatctcgataaatgtaaattaccaaaactgactcatgaaaaaatggatattatgaatagagcaataatcagtaaagcaattaaaaagacagttgataatttttatttactgacaacaataacaaaatttcaggtcctgatatttttatggtgaattttaacaaattttcaagctcctcctcaaccaattctcagaaggtttaaaactttaacaagaaaacactttctaacacattttcagaagctgttatagcatgataccaaaaccacacaagaaaattatagaccaatctcacttacaaatatacatgcaaaatcaaacaaaatcttagtgaaccaaattcagaattaataatagcaaacaagcaaaatatgttatcatacgtatggcttatatcaggaatgcaagtatgtttcaacatcagaaaatacttctccacattaacagactaaaggagaaaaacgcttgtttaattatctcaataggtttttagagaattttgaaaattttataaagttatgcgtattctgtaaaattgatgaaatccaaccttgatttatttttaaaaattgcctttcctatagaattataggtaaaggaaacacatgcatcctcacagagctacttcaaggctaagttacttcccataagtaacgtatcctgtaatgtgtgcttggcacatattcaatactaaacaaatatttgcaaatcctcaaaccacttctcgctcaaataacccacctttgtcttttgcctttatgttagggttgattttctcaattgtatcttggagatcctttggtgggtctttcagcaattaccctgaatttgcttttctgtttacaattttaattcctgggaactctttcttgttctctgactgcacccttttcatgagagttcagccatcaatcctccagaaccccaccccccccgcccccccaaaaagcaataaagatgtctaaaagcttccttctgggctttcgaatgatgtttaccccaggcatttgttctattcgttcatcacccattttccctacaacttgcctacacttgatatcagatttttatttattagtcacctatcttcttcattggcccattttcctattttgccactggttgttctcaaatgtgttatgattcctggttgtacagtcaagtggttgataatcttggatatacgataaagatttgctctgtagctgtgtgtaagcctatataaaagcttttgtatttttcttcttaaaaaagacaaaagatggttgggaagatccctccagttcaccagttcgaggctgcagtgagctatgatagcgccgctgctctagcctgtctgtctgtgaaaaacaaggggggcggggggcgggggggaagactggagatgtaaatctcccgcagggccctacccgtatccgcaacaggtctctaacaggaacagcctcaggcctgtgttggaacaaggtaggttacagaaatctggaagccagatctgtaacttcagggtaaggactggctctcagggctgatcccccgggctgggtgtcccagaggcacccgcccccgccccttccccaaggcaggccaggacaccttcactcctctccttaggctccccacccccttctcctccccactgtgcctcctggagtagcggtggcggtgccacaggggagcggggcggggcgggctctgagggcaagggggatgggccccgccggggtcactggcggccaccctggaaactcgacgcaggccggcccttctagtgaatcgtcccagccacagctggcctcccagccgcgcttggggcgcctcggggcgcgaatggtgcaggttggggagactcaccacgcaccgtcgggggtcggtccggttattcctcaccgctcggctccagtgggcgcgcgggcctctcctcctcagttcctgcgctgcagtccctccctcacccttcgcagcttgggaatccaactgtgtcattccgacggagcgccgtgaggacctccgagggtgttagcgccaagtgatctctgtccagcgctctgaatatccaagtaaaggagttcaatgaagggcgggtcaacggaggagaaaccgtgactctctcaagggagcccaaggcctccttgtctaattagtgacgcgccaatggatggaggctcttcccaccatctcttcccagcatccagtgacaccaccgccaagggacgggctcggcggaacctgcaggaaagaagcatcggctgagcctgactgcagcgctgtgaagagacaggggaggggatcagtagttggtcccgcgcccaccccctgtttccgcgaggggcggagttgactggccatgcaggcagagggcgaaatgtgaaattccactactcctaccgtttttccctgacccgatggggcggagtgtcgtcaggctaagttccctggcggtaaggtggggagattgaggcgcacacctgccgaacggtaacgcaggattagctaaggcgagctcaggacagaagcctcccgaggagcaggagggcaaaataataaataaataaataaataataaataactcactccttggtctttatttgcggcaggaattcagaaggtgaaagcggggccttaggatctttctgaccttttgggttttaagcaggaggtgtcagaaatgttaccacagggctagctggcttgtggccagcaagcgttcacaatgccctcgatttttcatccctctctgtgggttctttttttcattgtaaggcagaatttctacgattgctcacccactcagagaacctgagctggtttagaccaggtgagacaggctaggtttaccctggtgatgatgtgttgttgccatggcgatcctgcccagtaccagaggccctgcagattcagatgcttggtgcctgtgcttggctgaggggccaatgggtgaagctgccatctgcgggatgatgactgaagcctctaagtcagaatccgcccaggctgagccttagggcagctccatggagcctcggctggcctgggatagagagtccaccactgtgccagcccccagccactgcctaggtcctgtgctgagagccccttgtccagggaaatggcgtccagtggaaaagggaccacccccttgcccttcactcaaggcaggttggtgacaaccctgaagctaatccgttcctagaggagctgcttctgggtccgagttttctctgcagcagagcagctccctggatgggatctgttcaaagtccgcctttcacgcggaattttccgtccttgcaattttccacctccaccactaggggatcctctctgaccgcctcatgccggctctggcctctgagcaggggtttctcttctgcatgtgcgaccttgcgcatgcctagtggccttttgggacctagagctgctccacaccccgatggggttacagagtgcctcgcctccactccaccccaccagggttccttccctggctgggatgggatttcagaagcgccgaggaacagcccagacaggtgtgggagagtagccaaggcccctgtcccggggtggccaggacagcggtggcctcgcataggacctggctgggctgctgcaatcagtgtcctgccccttggagagcaacagtgaaaacaacaagactatcttcacccaccttaagaaagaacagaaccagtatccccaactctgctgtgtatcccaacccaattccattccccaccccactctcagtagccaatatgcaaaatattagaatactcttactgttattattttcaaccacactctgcatcctgaaaaaccatatatttcgttatgtgcttttaaacttcttgaaaatgaaatactgaggctgggcgcagtggctgacacctgtaatcccagcacttcgggaggcggaggcaggcggatcacgaggtcaggagatcgagaccatcctggctaacacagtgaaaccccatctctactaaaaatacaaaaaattagccgggcgtggtggcgggcgcctgtagtcccagctacttgggaggctgaggcaggagaacggcgtgaacccgggaggtggagcttgcactgagccgagatcgcgccactgcactccagcctgggcgacagcgccagactctgtctccaaaaaaaaaaagaaaaaagaaatactgaattttcaaatacttgctttttttttcggtcaaaattatgttctcaaatttcactcctgtagatgtgcgtggctggctgtagtttttgcatttttattattaggtattctcctgttgcattaatatgccacattttatttctctcatgtttttggtgaccacttggggtgttttttggttttgtatttttgctgtatacatgctgccatggtggacatacctctttatacatatttcctgttgtatgcagacacaattttaggatgtgacatcttcagcttttctattgtgtcgtgtgtcttttccttcgtgctttgtgttatttacatattctggacacagattctttgtcaactgtatgtgctgcacatctctttcccagtttgtgtcttcttcttcttttttttttcttaaaaaaaactttctttatagtgttttttttttctttctttctttgttttgttttgtttttttgagatggagtcttgctctgtcacctaggctgaagtgcactggccgatctcggctcactgcaacctccgtctcctgggttcaagtgattctcctgcctcagcttcccaagtagctgggattacaggtgcctgtcaccacacccagctaatttttgtatttttagtacagatggggtttcaccatgtttgtcaggctggtctcgaactcctgacctcaggtgatccaccctctttggcctcccaaagtgttgggattacaggcgtgagccacagcacctggcctgtgttctttcttaagtagatgttacttttaatataatagaatgtatcatattttgcttttatattagtactttttctatctaattcaaacacatccccaagggtctttgtgtgtagactgaccaatttctcaagaatcatgaatgaatactgcttctctttccccaatttatctgtaatgctacctttattataaagtttctatgcatgtgtagaaatagttcctgatttttcactctgtgccaccagcataccaatagcacgctgtcttaaatattaaatagcagagctttatgagacaacttgatgtgcagtaggcaattgcccccttgttactcttcttcagggttctttgttgtaccacatgaattttagaattggcttgtccagctaaaagacaactgcaaggattttatttggaagttcataattctatacataatttggggaaagtattttcataataccaagtcttcctattaatgaacacagactctctctctctctcccccacccccacctgtttagttatttatatctttatggtctgttagttattgtttattgtctttcaaccaggtttcatgtttttctacatagaggccttgcatgtgaaagtctttcttcctagcttgctattacaaattttttttaattgcactttttgggtacagtggcttgtactgtaatccccgatacctgggaggctgaggcagatggattgcttgagtccagaagttcaagaccagcctgggcaacataatgaggtccctgtctcaaaaagtttgttttaaaaattgcatttgctgttattcaacaaatgtcattgtgtctcatatatggatttttatatctgataaccttgttcaacaatcttttgattctaacaatatatcagattcttttgagttttccatatagacaataatgtcatctgtaaattataattgtttcttctttgttatttcttggaccttttattttatatttttgtcttgctgcaaggcaatatccctctatatattgtggggtcttttttctcataaagtggggatggtgaacacccttgtcttgctctctgattgtataaagcatgctttctgtagcattttgtagacgctcttttttagattgaggtaattcacttttatttctggtttactgagtttttagcataaattcaggctgaatttgagctaaagctttttctggagacatcatttgaaaaattcatatgatttactttctttaagtcaccaaagttatgatttacattgaactgagtttctactgtttaactgtattcttgggagaaaacccacttgtcactgaacaatatctgttttatttactgctgtcttgtgtctaaattttcttttaggattttttgtatatgctcagattagcctgttattctcctttctgtatttttttctggtttgggggtcaaagttataatagcctcacaataagagctaagaaaccagccctaatggaggccggggcaggaggtttggagttcaagaccagtctgggcaaaatagtgagacccccatctctatgaaaaatagaaattagccaggcatggcagtgagtacctgtagtcctaggtacttgggagggtgaggcaggaggattgcttgagcctaggaatttgaggctgcagcgaactatgattgtgccactgtactccagcctggatgacagagcgagaccctgtctcaaaagaaaaaaaaagaagaaataaaaaggaaaagataaaagagctaagcatctgtttccttttttccattttctgggagagtatgtgtaagactgtaattaactgtttcttgaataatgggagaactctgtaaaataatctggctttggtgttacctgtattggaaggatgaaaaataccaattcagtttcattattggttgatagggctactcatgctttttgttttgttttgttttgttttgtttttgagaggaagtctctctgtattgccctgttgtccaggctgagatgcaacgttgttcacaggcctgatcctggctcactacagcttctaacttccgatctcaatagatcctcccgcctcagccttcccagtagctaggactacaagcatgcagcatcacatccagcctcttttcctgcctgacccagttctggtttcctttagttttctaggtgttcatccattttatctaatgtttaatgcatttggcataagggtgctcagtgtcctttcattgtctgttgtctgtaactgttgccattttcattcctatttatgagtactggcgtcttctctcactttttcttaataatcctgctggaactttgctttttaaagaacatcttttgacttgttgattcttttttcatacatattaactattttcttattttttgcctttatatttatttcttttcctgtttgaaacattgctcttttcttactataaaaatgggtaagtagctcatgaattaccacctcttttaaaaatcttttctactgtaagcattttagcagtttacatttgcccacaagtaccacttcagctacaccctatgtgcttttacataaagtcttcatttttggtaagacatattctcaaattttaattatcacttgtttttaaatccatgatgttttatttgaaatgttgtttctaaagatacattttctggttatacttttattcttctaatttagcacagtggccacaaaacatggtctgtgcagtgcatacaatcgatgagtaatttctgagctgtagtatttggcataatatatggcaaaatttcctaagttttccatgtgtgctttaaaaaacttccagtaaaatacataaatctgttagatcaagcttctcacattgttcaaatagtctatatgtttactgattcatttgactgcttgatttatcaattacaggtaggaatgtattcaaatctcctattaaagtgtgacactcaagtggctttttaaagacagagatgccaaaccaatgaatacatgattttccccaaagcctgcacaaattctctaatgaaattttaccatgaaagtttgtttaattaaggcttactaaagcagtatgttgtcttttactttttaaacagagaatatatattttaatacatcgtttaagtttatgattaattatctattactgaggataagaatctttgcctgtgctcattcagcatttgcacttcatttatgatctgccttctcatagcttctgttaatttttatactagagacatttatttgtttgtataaatgttgaaggtttttttttgttgttgttgtttttgagtcagagcctcgctctgtcacccaggctggagtgcagtggcatgatctcggctcactgcagcctccatctcctgggttaaagtgattctcctgcctcagcctccagagtagctgggactacaggcatgtgccaccaagcaaggctaatattttgtatttttagtagagatggggtttcgtcctgttagccagggtggtctcgatctcctgacctcatgatctacctgcctcggcctcccaaagtgctaggattacaggtgtgagccaccgtgcccagctgggttttttatattataaggagatgtaatagatagatagatgtttcaaagatagtcaaatgtttttaaaatttaaaacacttttttacaggttgactttcaccatttaatttcatctatgtgttttgccttagagaaattttaaatgctatgtagatctcatgacttataattatgaagcattttgttttctgttttccacgaaacttagcttaactttgagcatataatagttgtaaaggtaggagagtaacactgaaaaaaggaattgcataaaaatggcacattttctgtagagttgtttatcgcctgaaaataggccccatttcatggaagtaagatgatcaggctcaggtccccagacgaaactcttggcatggtttttggagatagtccagggctcagtactggctctatcatttgctacttctcccaaagtaaccaatatctcatccaccctgagcccatttccatatctctaacatgaggataatagcatctaccttacacaccaagtagagggatcaaatgtaggaactaaatcaaagtaccagcactgaataacctacatcctcccacttcccaaaaggaagagagatgtatcccctgttgacaaacgagaccattttgcaggagagaaaggaaatgccagttcacttgcaatgtaaacatgctctctctttttagggatgtccagggacctgagagagaacccatgcttaccaaagagtttctagttccagacacacaggactcgaagggtgacaagtatggttttcagggtccctgaatccacccagtcctcacagaaactcctaaaagctgtcgattgacagcgttgagttcacagctctggtcctcacatgctgatactgcttgtgatatcgaacccgacaggaccccacatcacaattgatttaccaactacaatataatacctcctgaatctccaaattggctcacccaggaacaaaggcttggggtaaaactggattaggagatataagctctgaattttctgagggtgagacacacaaggattctaagtgacacgccacagagtaacgggtctgtgactggaggacccacagatttgtcttactggagacaccacatgcacacaaactccatccttagctgtggaaacaagggtcttttgctatcttagccgaattctgggagtaatttttggaggggaggagatctttgggattgcctctttcaggccctttacaaaaatacctacttcttaaatggtaaagcttacactaaactgaaaaaattacatccttggctttttatgaagtaggtgttggattgaatcactactggaagaagtatggcatcgcaaattctaagcagtggtcaaaggatggatctgttaaattagaaaaatctctaaatttataaaaagattttagattcctttattctaaacaattgacctatttgtactcatgggacaatcaaatttcaaaggagatatgtaacgatttcatggcttgcattaaaaatccttctgataaaattaaagataaaaaatctgaccccctgccaaaaaaatcttttgaagttcatactgcctgctttcaatattctgtgggattcacaatgaaaggtgccttatattgtggcctagcttcaagtttatgccttcgccaccatggcctgggttcaattcccagtcagggccccagcgcctttggtttaatgtttgcgtggcatttgacttttttacctatttagtattggtgagattacctttggtaaaaaaaagtttaaagagtggaaatcgcaattctttgtgttggctaaaatctgattataagagatctggaaggttttatttttctttttcaaagagctctatggtcagaagtcggcttcatgaaaagctaatatttaattatatgtacatacagtctttctggattttctcttttgcctcctgttttgaaaaatatttggatttgagtgaaactccgttttagaaattaattgcttggtacaatatacccatgtaactaccctgcacatgtaccccctgaatctataataagagttgaaattttgacaaaataaaattagattttgaattaaaacaaataggtgcttggttcctctgctcacttctttttaaaaggaattcctctcccatgtacttcttcttttcccttctttaccttccttttggcatctttggtatcacatgaagggatctagagggaattttaagtgactctgaaattccttgagaaatacacaaaaagatcccactcaccccttttgggggtctcctgttctccttgtggagtccagagtcagggacaggctcctccaggtctgcagctctgctctcttttatttcatcttggctgattgctttggttttgtgagtaccaggcattactttgtactgtgagagacacgtcctttgtgagtgcaacggctgctgggtcactggtgagggctgcagtttggagatggctgagagccgttgcaataaatggttgtgattgcagggggctccttgtttctttgcaagtttagatgagaaaggtgcagtttggacacagtttaaaggctgtgaaaacaccaccaatgaatatgatttcctttggggatggtctgattaaaagtgggctgattgttgctgtgctactagccttgaagacatgtttctacagcattgtgcagtgtggaaaaattgtgtggcttggtcttgtggcatgtcccttcttttagagacctcagattcaatgtgaaattcgggatttttgattttcaaagatctagatgccctgccttccagatgtgcctactcttcacatattttaaaattagatcctataaactgcaaatactttgttggcttctgtgagatcagaggtccagttagaaaaggaagacagtttgttaaaattaaaaactatttatctaatctaactagattggcctccaaatatgactttctgacattcagctggttactctgaaaagatttctaaatctcttgaggctcatctatatgtttccttgcaaagaaaaaaaaaaaaaaaaaaaagcaagcccaagcactagtaagaaaaagatttgcaatgtttcatgaaaggagtagatgagtgaagcatttatttgtagatactgggttggatacctgtgcaaagaagaagaggtcaataataaaaattgccaggggatttcttggaacttaacaagctgaattaaatatagaaatgtcaggaaatcaaggcaggaaatactcacttgtggttaggcagacagggcagggttctgagcttgagatggagcaaacagttgtggtgggtgaagttcacatgctttagagctcagctgtcctagtaaagaagcctaagagtctctaaagctcttatgagaagatggattttttttgcctagattaaaaggttaaagaattgctttaagttggataaaataaagctaaatgtttaagcaagttgtgaaaggtttatgaaaaaattaattaaaatatttttgtgtgtaaacatattgactaaagttgaaggggtataattcagcatttctgtaaattgagcattgaaataaaaacacaatgggtttctcttagagcactaacctgctctttaacaaaaattgtaaagggttatagaaagtctataaaaatgttaccttatggtcaaacattaaaattgggtaaatatgtctatcaggttttattaagaattaggtttaacattaatagtacactaatgtaaaggtgaaatttggcttatttggtacaaaaatcatacaggaagcattgtgaaatataaaatgatttttagctttctttgggctatatttctataaatatgttattgatgagggttccaaagttatgggagactcctataattctgctatatctcagtgtacattatcagtcataattataattgtcatgttaaattattgtgggccacagaggtaacagatttccttgtcaattgtgtctttgactatgactaccctaaaacgttcagtcacccatatacacatgttaccttgttttggccctctttagaaggtaattttataatcagctataaagccctaacaggtgctcttaaatgcaaattttgataactttggagattgtgacatcagaagagaggaaaaatgttcgggacacttggagagctaaaatgttcattgatatcaagcaggacaggaattaactgcatgaagtgaactaataggaggctgaagtgatctttttgactttttgcttaaaacgttgctgatcctttgttttgcttttcagagtcaaggcaaattttcttttgagctattgacagcttttaacgattaatcaaaatatactcctatgaacaccatttggagcattatttgtttctctctacccgatttccccagaatttggaaactatttgtgggtattcttaatttatggcaatatagttatttgcataagtgcaataagaatgtgttttctttggtaacaggacacaatttgaaaaactggttattttaccaaggttttgaccagaatgctgtgctttcctttaaggaatcaaacttgacttgtggagctaataaagcctttggaaaactgaccttatatcctgtgaacacagtccctgtacagggttactgatctgtgggaagaaaagaatgtcacattctgacaggtcaggaatcccaagttatcttgaaacttcaagaggacaggaattcacccaaccatatgtatttgatggtagaaatccatggcaggggctcagctttaaaaagtcttatctcagattccttctataaaacaaagtcccattaaaaccaattttaaaagcctatgtgaaaaataattattcttgctgcacctcgtacaaataaagtggcaaagcataataaagcaaattggtcctgtcgtaatttgtctttagtaaaaacgggaaactggggtcgggtgcagtggctcactcctgtaatcccagcactttgggaggctgaggtgggcagatcatctgaggtcaggagttcaagaccagcctggccaacatggtgaaaccccatctctacaaaaatacaaaaatgagccgggcatgatggcgggtgcctgtaatcccagctactcaaggggctgaggcagggaagcggaggttacagtgagtcaagatcgtgccacttcacgacagcctgggtgacagagcaagactccatctcaacaacaacaacaaaaaagggtaactggagagagggaagttatgtttcaaaaacttttggaaactatagtacacctgtttttaaattctagtctggcattcagtttttattattttctacagtttgggttaaattcgtatttctctggctacaagtctcctaaataatcttttcatttgtttcctttttctttccctttttccccatttttcttaattggaaatcactgaaacctaagctgtgctttcttaaagccctgtgaactgaagactagacaaccgaaacttctgaaggaagtagcagcaacctatttatatgtgttgctgttgcctactattatgttttagcaggtgctgcctctacacccccgaaacagagagtgctactgggaacaaatcgactttttccactccagtgctgcattcggtgccccataacgatgaccccctctcagcaggaagtagccagaaagattacaatgctccatctccctatgattcttgtgataaataaatatacaagcatgatagaaatcatgcgcaaattgacagtggggattgtggcaggccagatttcactaatggaggtccccatcacaactacttcagtactgactgagtggttaagttcagtatcaaaagctgaaagtgccagcgcctttctacaaaggctagaatgtaacaaaagcccaccaagggttttacctaggcctttcctgggccttacagcatgacaaaacaaagaaggaattcttaaccagacctgtttaggattaaacaaatttaattgggggtctgaagaaactcgccaggcctccacaaacaagttcattgggggtctaaaggaaccccccccaaacctctgtgattgagcaggagacaaggtcagggtaattgccccagcacctggactcatttagatttaagtaaatgtactgaggctccagagaaaggtctccaagacttagactagagttacagattaaaagaagttaatcacttatatctttagataaatgcacactgacacgtagacatacatcttagaaaatatataagctctggaaaaccttgtaatttacagttggtctggagatattttctgggccttctctctgtaaccggttccagaaataaaaaactctcttcctccccagtttatctgcatctcgttattgggccgtgagaaatagcagccagaccctgagtttggtctgggaacacactggctgggcttcctgcctggcggtagagcttcactgtcctccttcccagccaaaatgtggcccttgaaggcttcctccccaactgaccggttttgggttctaggtactcagggaacaccgtcttcaaggaggccattttcatactgttcctggtttgatttttctgaaattaggaaatgccccttgaggcatccaggattgtctttatttcccctgaagcttcccctcctgaagaaaaaagttctcaaacaccctcaggactcaaaccccaagttcaccctgtgaaacattcccatttcctaaacccaggcaggctcatggccctcagcctctcagaccccatggaaacctcctcccccacttcacgggttctctccatattgagagcctcccctcctcggcacacaacccagagactcaccccaacatgtgtagcaaatcaccctggaaacaatcatggctgaacgtggtagcccatgcctgtaatcccagcactttgggaggcccaggaggtggatcacctgaggtcgggagttcgagaccagcgaggccaacatggtgaaacctcgactctactaaaaatacaaagttcactgggcattgtggtgtgtacctgtaatctcaactactcaggaggctgaggcaggagaatcacttaaacctgggagacagagattgcagagagccaagatcgcaccattacactccagcctgggcaagaagagtgaaactacatctaaaaaaaaaaaaaaaaaaaggaaaaggaaaagaaaaaaaaaatcatgaggcaacattgcatttaacaatattttatttatcaaaagacacttgtctttctcaggtaagtgaaggtctagagatgaaacgagtcccgatgtaaattgccccatgggcattgctgagatcacaagatcatcactgcagcatgcagcacaatagtaaatttctcaggatggaagttcaacaatccaaaaggtagtattttttttcatgatgctcagtccatcatacgaaataaaaataaattccttttcatgatcatccattcagtagaaaaaatgatagtaaatttgttctcatgaagatttttaccgtaacatataggatttatcgttattattattattctttgttttttgtttttttgaagcggagtctcactctgttacccagtctggagtgcagtcgtgcgatctgggcacactattaacctccacctccagggttcaagcatttctcctgcctcagcttcccgagtagctgggattacaggcatgcgccaccacacccggctaattttcgtatttttactagagatggggtttcaccgcattggtcgagctggatttgagctccggacctcgggtcatccgcccatctcagcctcccaaagtgctgggattacaggcgtgagccaccgcgcccggcctcaatttatcattattcacgcatccacaaactgggttcttatattttgtacgtgattttttccattgaggagagatatctgtgcatattcatgctgctcatatttcatccacaaactcggttcatatttcatccacaaacataattttttccgttgagaagagatacttgtacatatttatgctgttcaaattcacatttcatcattcttttacaagaaatagataatgtattttaaggttttccagtggtattacagatattttactgggtgtatagatagaaattaaaccaaacttctttgttctggccgccagtcatgcatcctgttttcaacatagttcacatacaactggttgtgtaaaaatgaaattattttgtttagtacaatcatcaacagttggttgattagatttttaattatcaagttaatcattgtcattatgcttctcatcgcactcgtcattaattgctgtgggaggaaatttgttatgttccctatgagagggtgtatcacaaattcaaataagaattcaacgacaatggactgtataaaggaaataagcaagtccatggaaaacatatttttttccggaaaggattaaaatatttttaaaaaggaattaaaaaaaaattgggcacggtggcaaatgcctagagtcccagctgctcaggagatggagacagaaggattgcttgagcccaggaataagttggaggctgtagtgaacagtgattccaccactgtactccagccagggcaatagagggaaaccctctttctaaaaagacaaaaagaaacaaaacaaaacaaaaaaacaccacatcaaaaaacccaacaacaaaatgaaaaaccaaataacagcaatacaattggagctattcgatccaaagaagtaaatgaaacataaagcaaataaaagagaaaagctaatacctgtgtcctgcaggactcagtccaagttctgctctgactccctcctggtgagccaccccttaaaaagtcacttggggcggggttactttgacagacagtcttctgtcaaagagggaggcggtaaatagcacttttttttttttaatttaacgcctttccaacaaattagcggctatgttgtctaagagtgcaaatgtcagaggtgggtacaggcagcaagaccctccccacaggggcagcagaaggaggaatgactaagggaacaagactttagtgtgctcaactacacaggacaggaaacagatgctttttacaaaagctggtggacttgaaggcagaatattttcaagttcctgtaactgcgaactatgacctgtagcctgtgagagtgactttctgtggcaaaggagcttttgtgaatgtgaggaagttaattatcttaacagtgggaggttctcccggcttatctagctagaccctcgtgaaatcccaagtgtccttaggaaggggaagcagagagagatttgagtccagaagaggaagaaggtgatgtgaggcccagtaggggaacaaagggcgatggcatgtaaacacttagcccccagaagtgggagagggctggggttcatcacaccagaatccctaacaatcagccttattttaattacccttgaaatggaaggaggccttagagagccagaggcttggaggggcaccctctgctgcatacacagatcccaactgctgtgggctccaaataattgcaccagggaaatcacaaattatcaaaaataaaggatgtaaagcttttaaaaaatattaaaagcccaacaaataaaaaaagttctaaatctataaaattgacctcagtctgtatatttagatgagtcatgtgtatatagcgtttcacttcaaaatatatgataaatctctcattcattggcttaaaaataaacacttcaatcaagtctttatcagaaaaattgaaacgttaactcaattgccttttagttcatgtgactttacaaaacttaaaacaataaagtcagttttaaaaattattagtaaagtaaaagaaaaatatcttcacaatgtagacattttgtccacatgagacatgtgaaatattgccattactaaatatttgcaggtcaaaaactgtttccaaaacattttaaataatcatctggcctgtctgttttagagcattcaattctagctgaggtctggggacatgtgaaaggagccacggcccgactccgtgctgggaagagtcagacattttccacagctctgtcctttgctgtgggctctgcaactcctaccaattaaaattgcttacgtttttgttttatttttactaaagaggggttcctaaaagctaacattatactgagtatatgtaactaaaactactaagaaaacaatttcacaattatacaaatgtgccaagtaaatgaaaaaataaactgtattttaataaaggttataaaaagaaaaacatatagtggtgtgaggactgtctcaggtcttcactgagcaagggatcatgacattctatggcggacagctgaccttggctttctgctcctcttgattatgtctactaagtgacatacttactctttttccacctgtcttgcctctaagggtaacaggttttatgagatccctcctagtgctttgcaggtcagcctccctttgctgcattccaattttactgcctataccctccagctggcttttgatgacaaaagtcctggtcccagccattctcagattctgtcatccccgtgggcactatggagctcagcactatgggaggttccccaaaaatctcgttttctatgaggaatggccaccacctgcatctcagtgatgctagtgacccctttcctactcctgtgctcactggtcctcatgaagatcctggttggtctgtagccccctatttttcctattaaagagaaattacagtaagacccatttgtgtgcaaaatcaattttaggcttattacacttggcctgataatttgcataaaatgcagcaagaattcatcggccatataggctacttttgagttaattttcctgggtttttacctaaaaatatactattttggttagagtcttgtgaaaataaccaatgtgttcaattgttttattttaaaaggctcttactgaacactataaatatgtataagttgaatatacaaactatattgtcataaaatcacaacccaaaatgtggagaacgcagagggaaaggtaaatttgctcgcaaaaacatacttcacccaaataactggaaaaaaaaaaagactttcatgacccttctttaaccagagcagcagctttcaaacaaggtgtttgccttggaaatgccattcacaagccaaacggcccttgagagctgtctgtcaggcactgtagaatctagcagctcctcacagagttagaaatagtttcaggaaagagattccctgcttttagtaactgcactttatattcccagatagcgagattgtatgtaaaccatttttatcttattctggaactcttttgggtactttttttttttttttttaaatgatggagtctggctctgttgctcaggctggggtgtagtggtgcgatttcagggtatgagaaaatgcagctggacctggctctttccaggaagaccctcacagccaaggagtccaaagcctggggttttcatctaattccagtgtgactggggtaggagcagctttggtgctgggtgtgtgtgtgtgtgtgtgtgtgtgtgtgtgtgtctatgcctgtgtctgtttagggtgttaggctcgtggttgtctagatacaaatgtcccagggctcaggagccccagggttatgtcaggggcaccagatgaaggtgtcaacagaagttagggcacaagggacaaaggtgagagcaaggttagattcatttaggtgcaagaaatcatagagggaggagggagaggaagccctcctgctaccaccgaggaagaagcgcagcttaaggcagaaagcctgtccggagaggaagtgagtttgagggcagggctctctgggtaaagtacggtctgggacaccagcctgggggaagggtacagaatgcagagtggcctggcgtggggactaagaacagaggagagcagctttcactgggagggtcagtgttttcagtgtccagcactgagcaaggtgagatttgggcagcttgctgtgaaataaggtcaggctctggcattgtccccattgcgtgtgtgtgtgaggggcactttgggagagtgaactctccacctccatcctctcatacgtccttcaaccgagcttgccagttaccctgattccaaggagatctatttattgttgacaatactggatcctagcagaggctgggtaggagcctgggcacaagcaagtggaggagggggcctgggcctgaaagacctgggaggtttgagagaggacacagcccacagaatggagcagatggggtagagtcggcaagcattcagggctcctagtaagttggacaatggagaccctgaaagatccagtaaaacggggagaacaaacaggtccccaactcacatccttgcagtgcctggagcttcagactccagacaggtggggaaggaaaattgagggatgtgaacatgttggagaatgtcgtgccctgaagaatgaagaaaaggggggtgaggaatgagagcaggaacggcttccagtgcctggtgcccaggagaactcagaaaatgggtgtggtggagaggaatcgaggaaccggaagtggtggaagtgtgcagggcccctccgagatcactgtgactgccaggcgtcctccctggctggagagcttcactgtcctccttcccagccaaaatgtgtcccttgaaagcttcctccccaatggactggttctgggtcctatatatttgaaggggtggcctgcctctccacacctgtgggtatttctagttgggtgggaggagagacagagaaaagaaataagacacagagacaaagtataaagaaacaacagtgggtccaggggaccagcactcagcacaccaagggcctgcaccggcaccggcctctgagtttcctcagtttttattgattattattttcattatttcagcaaaaaggaatgtagtaggagagcagggtgataataaggagaaggtcaatgaaaaacatgtgagcaaaagaatctatatcataattaagttcaagggaaagtactatgcctggacgtgcactcaggccagatttatgtttctctccacccaaacatctcagtggagtaaagaataacaaggcagtattactgcaaacatgtctcacctcccgccacagggcagcttttctcctatctcagagttgaacaaatgtacaattgggttttacaccgagacattcagttctgaggggcaagcaggagacagtggccttcctccatctcgactgcaagaggctttcctcttttactaatccacctcagcacagaccctttatgggtgttgggctgggggacagtcaggtccttctcatcccatgaggccatatttcagactatcacatggggagaaaccttggacaataccccgctttcaagggcagaggtccctgcggctttccacagtgtattgtgcccctggtttattgagactagagaatggcaatgacctttaccaagtatactgcttgtaaatattttgttaacaaggcacatcctgcacagccctaggtcccttaaaccttgatttcatacaacacatgtttttgtgagctccaagttgggtcaaagtggctgggtcaaagtggctggggcaaagctacaaattaacaacatctcagcaaagccattgttcaaagtacaggtctttttcaaaatggagtctcttatgtctttcctttctacatggacacagtgacagtctgatctctctttcctttccctacatatattcatggaccacagtcttcaaggagtccatttcctcactgtttttggtttgatttctctgaaattaggaaatgccccattgaggcacccaggattgtctttacttcccccagagcttccactcctgaggcaggagcttctcaaacaccccccaagactcaacacctaatttcaccctctgaaaccttcccatttcttaaatccaggcagggtcatggtccttagcccctcagatgctgtggagaccttctttccctttcatacattctctcaagattaaaagccacccctcctcagcacacaccccagagactcaccccaacatgcattgcaaatcaccctggaaacagtcataagaccacactcatttaataatattttatttatcaaaagacactctttctcaggtaagtgaagttctggagaggaaaagaggagtcctgatgtaaattgccctgcaggccttgctgagatcacaaggagattgttactgcagcttgtagcacaatagtaaatttcttctctggatggaagttcaacaatccagatcgtagtatattccttttcattatgctcagtccagcaaatgtgatgataacaaattccttttcatgatcatccattcagcagagaaaatgtttgtaaatgtgttttcatgaagatgtttaccataacatacaggatttaccattatcaatgcatccacaaactctgctgttgttttttatacataattttttccatcgagaagtgatagttgtacatattcatgctgttcatatttcaaccacaaactctgctggtttttttatacgtaattttttccattgagaagtgatacttgtacatatttgtgctgttcatatttcatgtttcatcatccttttacaataaataggttatattgtattttaagtttttctaactgtagtgcagaaattgtactgggtgtatacatagatatcaaaccaaatttacttgttctggctgataatgcatcatttatttcatagattatgtatttctttgacacatttcacgtacaactaattgcataaaaatgaattttcttttagtatagacatcagcatgtgcttaattcggaatttaattgttgagttaaacatcgtcattgccttttccgttgttattaattgctctggtgggaattttgttatctcatacataagacagtgtgccacaatatctcttaaaatttcaatggcaataaactttatatttaaaaacagggaatctatggaaaacacatttttttctaaaggattaaaatatttttttaaaataattttctaaaaagttaggcacggtagcaaacgtctagagtcccagctactcaggaggctgagacaggaggattgcttaagcctacgagttgggggctgcagtgaactgtgattgcaccactacattccagccagggcaatagaagttaaccctttttctaaaaaaaaaaaaaaaagaaagaaagaaagaaaaaaagcaacaacaccaaaacctcaccaacaaaatggtaaagaaaaaaaaaacagcaatacaatgtaagctatttgatccaaagaagtcaatgaaatttaaaacaaatgaaagggaaaaagtaatacttgagtcctgcaggactcagtccaagttctgctgtgcctccctcacggtgagccacccctttagaagtcacttgggtcataagttaacccgataggaagtgtcctggccaatgaactagggaggtggtaaatggcaccattttaaatttaaattcacggccttttcaacggatcagtagccatgttgggtaagagtgcaaatgtcagaggtgaaaagaggcagcaggaccctcccctagtgcttgggcaacagaaggtggaatcactaaggggacaagactttagcatgctcaagtacacaggacagaaaacatgctttttacaaaagctggtaaatatgaagagggaacattttcaagttcctgtaaccaagaactaccgcctgtaaccggtgaaagtgactttctatggcaaaagcgtttttgaaaaggtgaggaagttaaatatcttaatgttgggaggttcttctggtttatctggctagaccctaatggaatcccaagtgtccttatggagcggggagcagagagagagatttgagtccagacgaggaagaaggtgatgtgagtctgggtgcgggacagggggagaatgatgctatgtggggatctgggctggggaatgacttagctgcatgagcggagtgacttagactcctgaactagaagaaatctagggctcatcacctcagcagccctaaccatcaaccttatttttattacaggtcttccatcgacggactccctaaaaagccagcggcgtggaggggcgccctctattggacaaatagatcttgactactttcggccctcaaatagcctgactaggcaaataacaaataataataatttttttttaaatcatggaaaatattttaaaaaacaattaaaaagttataaatctataaaatctgcttctgtctgtgtgtctgtatatttagatgtctcatgtgtacataatgtttcactaccaaaatatatgatgaaaccctcattaatcggcttagaaaactaaacacctaaatattttctcagaaaatacaaaaactttaactcaaatcccttttaattcacctgactttaaaaatctttaaaaaataaagcatgctttaaaattattagtaaagtaaaattagaacatcttcagaatttagacatttggtttaaattatacaggtcaaatactgcccttagtaaatattttcaggtcataaacaactcctgtaatcttttaaataattgaattacatgtctgttttagagctttaagttctagctaaagcctggggacaaatgaagggcaccatgccccctctctgtgctggaaagagacattttctacagctctgacccttgcagtaggctttgcaactgctacctatcaaaattgcctacatcctaagtttattattaaaaggagttgcttggagttaacattataatgaatatatgtaactaaaactatttctcatacaaagtatatgaaaaagtagaatgtatttttaataaaaagttataaaaagacatgaacatgtagtttttataaaaaacagtaattttgtctagttttgcagttctaaaaagttatgttaaattcaaaaataaaaaataacaagacaagactcaaggtttaaataagttgtaaaagatttgtaaaaattagttctataaaaattttacaaaaaaaagcattggttaaaatttaaggaattattttgtttttacagaaattaaacattcattaaaaacactctgatacaaggccttaatttgggttcatgtatcagaatagcagggttttcttagaatattaatctattctttaaaagaactatgaatgttatgcaaactttataaaaatcttaccttagagtcaaactgattaaaattccatagattttacgtaaaattttattaaaaattaacttcaacaaaaataaaatttgattttctcctttaaacaaaagttttgcgtaatattaaataataaagcatttttgtttaccttttaaactataaacacacacacacatacacatacaccaacactaaagtcagctgacctcatactgtctttattggatattcttgtttaaaaaactatcttctttggaaaataaagttttttattttaaaccatattttaaattatcattttgactaaatccataacatacagtgatctgtaataattctattttataatatcaagtgttttgaagaactccaggaacagccatgagagaacactgtggtttagtaacactttatttcctcagtttgaaaatagttgtctttcttggggaggccggtttcagcagatgaaaacaagagtcatgatgaaaattacccagcagtggttagtgtgaccataggaacattgtcatcaggtcagcagaaaacatatcagcaaatttttctcatactggcagtgtgtaggggtggatgtttacagttcctgaagccccagtggtcgtgtggtcttttagttttgccatttataggcaacttgtggtaactagctcaattagacacattccttatcacaaggacagagggctttctgtatcctagggttcttgccttggcattccagaagaatcaggtcacacgtggacgtggagaatgagtgcaaggttttattgagtggaagtagctctcagcagatgggggagccagaaaggagattggtttctccctggattggggccgttcagcagccctggctctcctctgactgccccaggcaaaatccacatcgttctataagtcggtgccctgctggtgtgctggtgcctgttgtcatgttcctcttcatgtccagccgcctgtgtgttcctccgctgatgtgctcctctcgacgtcaagcctcctgtgtgtctgactgctagggtcttggggtttttataagcacaggatgggtcttagcaggccaggatgatcttgggaaagacaacattcggtcaggaaaacaaaaatgcctgttgtcatctaggtccgtggggacaagcccaggtgtggagcttttagccagggaccacagcctcctgtatccaacacttcccttcaccttttctatatcattcaaagggatcatgcccttcccatcccagcacttcactttcatgtcatttgccccctctgaagaggtacatctaactgccattagaatatggatgatgaccagtcttagctgcttcctgctgaaagggggcattgttttgggggaaaacggcagtcagattcctcccaggggtctctataataaaagatcgaggtggctactttcaggaggtcctctaatgtactatctggtcccaagtcccatttctgcaacctcctcctgatgtcaggagctgcctgagtaataattttatcctttaggattatctgtccctcgattgaattaggagatagagaggtgtgatttaccaaggcctctcttagcctctccaggaaggcagtgggattttcatcaaatccctggttaattatggacaacttagtataattgagaggcttggtcttagacctacgtaagccctctattatgcacacctgaaagtgtctcctcttccagtcttccatctcattattgggatcccatttagggtccttcactggtgctacttctcttccagttggataatattcgctcccttccctgatgctataggtgatgcaaagctcatccccaaatctctctgctgctggcagagcagcctgcttctcagtgtctatcaggttctgactcaaaagtaacataacgtctctccaggagagttcaaatgttagggtgaaattctggaaagcttctatatatctatcagggtcatctgaacacttgcccagatctcccttaatttgctttaagtcttgtagggaaaagaggacttggaccttactgggcccaaattcactgggcatctgtaggaggggcaagagtgagactgggcttgtttgggatgaagatttctaggaggggccaggtgagaggctgaagctggatacggaggttggggtggacccagaggagcagggcttgagggagctggcacgtcagctgggggtgcgtctgggactcgtgtctttaattccctgggcttgaccctggcagccttccccgagacagcaaacaggagggctggaacaatcctacatgtcagcaaaggtctggattgctttgcaaggtatagaaagcctgcacatttggggcctcagaccatgtgtcctcacatccagagaaaagttctaattgcaggatggtattgaaatgaatggtcccttcctgaagccaagccagtccttcctgtaaaccataatttggccaaacctatgtgcggagggctatgagatgcttttcctctggattctgagggtcaaaacagtcccaatggttcaggatacactcaaggggagtacaagctgggggtggtgaggagaactggctgcccattctgaaagacagggaatagaggtgttcctcatttcccttccttcttttggcaaaaagctcagggtgtgatggggagggaaagcaagcatcttcacttcactttccacctcttacccctgcgccctggcaaccttggcaggtgccggccacaggtacaaatgcggtatgtacccatgaagcagggagaacctggagattaggaattaactgccctcacctatgtttccttttctccctgctgttgaaaaactttgagttccctgggcctttttatcccatgaggcatggcctccttctgtgggatggggttcagtcagcaggaattggtcctgtccatttacattgtgcctgttgcctggctttgaattcctcagacctgctttctctttctagggcctcagcctgaagcttggaattgagtttgggactgaaaaagcatttcagaggctgtttatatccatttagtgcctcaaataagccctgctgaatttgcaattatcagccagcaggggtcactcctctgttaacttccctattagaaacagagcggtggggattctcacttagaaaagaaaaaaagagaaaaacagttaaagaggcaaaaagtggggaatgctgggggaagaaccccttgcttagtgcaagtgggcccctctaatccttataactttcccatccttcccccagttcagaccaggttgaattccttggccatggaaggaaaggttccattgatgcagtgggtgagaagcactctgtagggtcctggctaccatcggttttctcacacccccctcatcccaggcagtggagggagacacttctgcgacattgctccccctgccccttcatggctattgggtgtggcctttgcctgctgcaggcatgcctaggtgctggagctgggagggaaaagggtaaggagaggtgccctggaagccgctcatgcctggggctgtcaaggtggaggcatacatggcacctctaggaaaaattggtctgatttgcacctttggcggctgagccaaatgctcattttacttagtaacattgcctcagcctgtagcaaaactcttaacattataaaggaagagataagatccatttcaaataatgtgtgagagagaaaagagatgaaaggaaaacagagtcttttacctgcaggaaagggagagaagtggcagagttttggaagaaaggcaggcccaacagtttcccattcactcacactcaccttccgagatcccagacgagccaccagttgaaatgggaaaagtttccttgtccccctcacaggaggtggagtgggggtgtggcttgcttctttagtactccgctgctcaaacctctagggaagcatacagactggcaagttgtggggctacaaccccatggcagcatctaggggtagatgtttacagctgctgaagccccagtggacatgtggtaccatgtgctcttttagttttgccatctataggtggctttgtggtaaccagctcaattagacccattccttaacccaaagacagagggctttctgtatcccgcggttgttacctaggtgtaccagaaaaatcaaatcacacgtggtcttggagaatgagtgcaaggttttattgagtggaagtagctctcagcagatgggggagccaaaagggagaatagttttcccctgaagtcgggttattcagcggcccaggctctcctctggctgccccagccaaactctatgtcaatccattggtcggtggcctgccagagtgctggtgcctgttggtggattcctctcagcgtcgagagtttttccctctcaggaaagggagagaagtggcagccacccatgtgttcttgcactgatgtgctcctctcgacgtccaacctcctgtgtgtctgcctgctagggtcccagagtttttttaggcacaggatagggcatggtgggccagggtgatcttgggaaatgcaacatttggtcaggaaaacaaaaatgcctgtcctcatctaggtccaggggcacaagcccaggtttggagccctagccagggaccccggcctcctctacccatcactttccttcaccttttctgtatcattcaaagggaccatgcccttcccttcccagcacttctcttctgtatcaataggtgatgtttttaaaatttcccaactctagtgcaggcatggtactagacatatacatagaaataaaaccacacttattcttctggctggcaagacatagtatttttgccaaattatgtgttgttttgaagcattttatgtacccctggtcatataaaaataaagctattttgttcagtacaaacagcagcattttctggattagaaagttaatcatcttaaaagatcatcacggatttttccattgcactcatcactaattgctttggcaaaaaatttcttatctcacgcatgacaaaatcagccgcagtatctcctagtaatttaatggtgatgatctttataaaggaaataagcacatcaagggaaaacataattttttttaaaaaaagagtaataaaactttttaaaagtcttttttaaaagactgcttttctaaaatagtaaaataaaactccaccaataaaaccaccaacaaaacagaaaagaaaaaataatgatatgatcggagctatttgatgaaagatggtaaattaaatttaaaatgattagaagagaaaaagcaatacctgtctcccgtaggtctcagtccaggttctgctatgcctttctcctggtgagccacctatttaagagtcgcttaaagcatatgttaatccaacaacagcagattaaaaaccaatgcaatctgaactatttgatctaaaaacataaataaaatttaaaacaaataaaagagaaaaagcagtacctgtgtcctgtaggtctcagtccaagatctgctctgactcccttgtggtgagttagccctttagaagtcacttggggtggggcatatgttaattccactaacattggttctggccaatgagtcaggaaggtggtaaatggcaccttttcttcttgctgatttctttcagttcctttggagtctggacattagtcctttgtcagatgcctagtttgtgactactgtttcctatactgtgggttgtgtgtttaccctgctgatatttcttctgccttgcagaagattttcggtttcattaggtcctattgatcttattctatttttatatttttgcgtttgcttttggggcattagtcatgactacttggcctaagccaatgtctagaaaagctttttggatgctatcttgtagcatttttagactttcaggtcttagatggaagtttttatatgctttgttaaagatcaggtgactgaaagtaccgggctttgtttctcggttctctattctgttccattgctctatgtgcctatttttatacttcctgcaccatttattgaataaagtgtcctttccccaattagtgtttttgcatactttgttgaagattagttgtctgtaagcatttggctttatttctgggttctctattctgttccattgctctatgtgcctatttttatacttcctgcaccatttattgaataaagtatcctttccccaattaatgtttttgtgtactttgttgaagattagttgtctgtaagcatttggctttatttctgggttctctattctgttctattgctctatgtgcatattttataccagtatcatgctattttggtgattgtagccttgtagtataatttaaagcctgccttcagatttgttctttttgcaaagtattgctttggatatgcggtcacgtttttggttttgtataaattttaggattcttttttctagttctgggaaggagaatgatgatattttgatgagaattctactgctctgtagatggctttggagagtatggtcactttcacaatattgattctacctattcataagcttataatgtgttcccatttgtttgtgtcaactgtgatttctttcagcactattttgtagttttccttgtaggaaacttacattaacctacttggttaagtatatttctaagtattttacttattaaaaattctcagggaaatgcaaagtaaaactgaggtgggaaattaaagaaaaataaaattaaaaagaaagggaaataagctttcttgtattaagctaacttgtcccagaggcagcaacaggcacagcccagacccaggaaaagtcttgataatattatttattgtattctggagactcttccagcactccttcaatgtagggagaagaaaaacaaattttcctttgttttatggtatgagtttatagattcttgttctctttaactagtaacttcaagtattctgttttatctaagaagtatggcaaaggtcatgagaagcctgagcaggcctgaactacagctctctaggcaccatagtgaagataaaccaatgcaagcctctttagagcaaaacctagataatagacatctgggttgcatagcaacagttatgtgcaatcctgagttatgaacctgttacaatttgattaactgtctttttcctgcctctgtatccctgctttcacaccactgtaagcttgcttcaagctggcccacccccttttgtgaagtgtgtataaaagtcaagtgctgtctttgttccaggccctgtctttggacgtgagtctgctgggcctgagagcactcaataaaagattctcctgttttaacccaaagcctctctctcatcctcctaaatcccacaacaaaaccacaatgagatgctatcttaatcttgctagaagcccataatttaaaagtcagaaaacaatagatgttggcatagatgtggtcaaaagggagcactttgacactgctagtgggaatttaaactagtccgaccactatggtaaacagtatggggattccttaaagaactaaaagtagaccattcattccagcaatcccattactggctatctacccaaaggaaaagaagttattccataaaaaagacacaagaatatggatgtttatagcagccgattcgcaattgcagtgatatgggaccaacttaagtgcccatcaacgaacgagtggataaagcaaatgtggtacaccatggaataatacttgataataaaaaggaacaaaataatgtcctttgcaacaagttggatggaactggaagccattattctaagtgaagtaactgaggaatggcaaatcaaatattgaatgttttcacttttaaatgagagttaagctatgagaatgcaaaggcataagaatgatataatggacttggggactcagggggaaaggttgggagggggatgaggaataaatgatgacatattgggtatattatacactgctcaggagacagatgcctcaaaatctcagaaattaccactaaggaacttttatccacataaccaaaaaccacatatattccacacactattgaaagaaacataaacattattttaaaaaataaagccacttttaaaattagcaaaataaaataaatatgtcttcagagtttagatattggatccaaattagacagatcaaatactgcctttactaaatattttcatgtcattaacaacttctaaaacctttcaaacagttttttgacatgtcttggaaccatccatttctagctaaggcctgggcacctgtgaaatagggccatgcccccccttatactgggaagagtaagatatttcaagactaagatgttttctacagctccatctttttctttaagctctacatcaaggacataattaaaattggttgtctcctaagtggtttactaaaaatgcatacttaagagttaccattataattaatatttgtatctaaagctacttaaaaattttcacacacaaatctgactgaacaagtaaaatatattttaagtcaaagtttataaaaggacatgagaacatagcttttatgaaaaaattagttttgtcaagtttagaggttttcaaatattttaaattcaggaaataaaataacaaaaagacaaaagaaaatggttgaacaacttagaaaaggtttgttaaaattcatcttataaaacaatctacatgtaaaaagtgggctaaaatttgaaagagattatttaggttttccataaattaatccagaaggggtaggaagtcttaagaatgaggaaggacaggaggaaggggaggtcatcctgacactgcagaggcagaagtgcagctgaaggtatgaaggctaagaggggaggggagtttgagtgctgctgcctggctgtcagagcagaggagggtcctgggcaccagacttgaggaagggatgaaaatgctgggcagacctgtagtgggcccttgagatggcagatagtggtttccagagagagggccattgttttccagtgcccagcactgagcagagagagttttgggcagtgtaaaaaaaaaaagagaacttacctctttctcgttttagaaaaagaacagtctaagaatatcagcagggaaactctcagtgcttcaaggggttaaacgcccttttggctttcttgtgttggtttcatcatagaggaggagaaacttcttggaagtgttcctaaaaacacaacacgtctgcttctcctttcaaaaaaggaagtgctaaaacacgaacactctagatccaaatattaatacggatgtctaaatgcttccgttttccaaggggcagaaagctaaaggttgtaacctattcatttcagtcaaagttggtgaaagggaagcaaaggaactgggtggggcttggaaggatgacgaagctcaagctcattggccagcaacctctctcctgggggcgggaggggtgagcatacgtcattgctttggcttctataaaatgaggaggactcaccgagtgtgaagagtccttctggtgattgcagctgagagcacactcacgacgttctgcaaggattctctgattatgattctgaagggaaaagcgatggaatggacagcagagattgtaattttctttatcttgaattacggaagaaagtatctaggacagaaatccacgacaagtccttggaaccagcagatctcttcgttcacggagacgttgacgtattctctattgaagaagattcttaccttcttactggacaaggttttgtcagttctgcgtgactggattgtccgggagactctgaggaaactgatgtcacatgtttttccaaagaagatgtttctggaaccaacaactgtgattgtggtttgaggacttctgagagttccagtacaggaaataagcagaacatcagctggaggctaaacggatccagacttcactcttcacttcccttcctattcagtctattgtgcctgctgactgagaagcttggctggtatgtgagcaaataaacggaactattcagaaggagatgttgacatattctgtattgaagaagatccttatcttctcacctgacaaggttttgtcagttctgtgtgactggattgtccggaagactctgaggaaactgatgtcacatgtttttccaaagaagatgtttctggaaccaacaactgtgattgtggtttgaggacgcctgggagttccggtatgcgaaataagcagaacatcagctggcggctgaagggatgcagcctccactcttcacttcccttgccattccatctattgtgtctgcctgactgagaagcttggctggtatgtgaggaaataaacggaattataaacaaggagattgtttctcatctacttcattctgttgtggcttttctattttggggttcagggtgtgtgacaaggaccaaggagatgaaaggtttcatgatggagaaagcccaggcaatcagattgaagagctatccacagggaatcttggctgctgaggggctgcaccctgcaacggactgaccatatgacagaaaagggttttaaaggctcaacttctggactgagaacccagagtaatttgggaacctcctctgtgaggagatatgaaagctgggaatcatgacatccctaggaatggaaggcacatttcctgatggaaggggtgctttggaaaacaggagcagagtagacacagcagccttgtggatacgggtgggcagcatgcatgggtgatgtgaacgtggagtgtttgtgatcgaaactcaaaatgtctgacaaagtgaaaacctagaaaccacaatgaggaggaagagtttgtgagggcaatcactctccccatgtgtgaaaatcgggggctcttaaaatctcatctggagaggtgcagtctaccaaactctgggactttagcctccccttttaaaaaaccgtgcatcaataccaacgtccgaaaccacagaaataacacctggcttgcatggagacaaggacaaaaagccgtcatgatgagttgttctgctcacttgctgcctctgttcagtgcacaggatattgtccacccactagcaggctactgcaagagaagtgtgcaatatgttccctatgtgccatatatgtgccatatggcccatatgacaactgagtcagaaaatatctgatgccctcagagttacactccacctggagcttgcccccagccatccaggacctaggctccctaccctgtccaattttctggtgttttgggggcttcattctctaaggtgtgcccactctttactcaaaccaaaacacccacatattcctgcccatgaacaaccaatcaaccacttctcagttccacatcctgctgttgggtctctagtggtgacactgtaactcccaggtcatagtggtgacactataacacctagctaaattgatgccttgtctctaggaggccatgggctcctgcaggtctcatctgactctctgtagccttccctgacaatgctcacaatacccaagccagagccacattgacagcaagctgctctcatcttacctttgccagacctggccactggaaaaggctgaccctcatcctgcaatgcctatacctccaacctttgtctcaagctggtgtcctggagggacttctaagcagaaaacagattcagactcccatcctctcctgaatggcctcatatccaattctcagaccctcagccttcattgtaaggacacttcatccatgcccttgagtattctgtctgcactgtgtattctgcaatagattctcctccctctgcgaccctcaactccttccgcagactttttgttttcttgatcatctaccatagtcttccactgggacactgccaagcccattctggagagtgagttgtgcaagtacactgccccccatctacctttcgggaggtgtatacacccttctttctcccaggtctggaggctttctattttcatcctgaggcatctccacctgctcttggattcttcaaattgacaaccaccagttaacaagaactatgtgtcaccaaatagccaaacaatggcaattacaaaaataaaattaatagctgtaacccccattagcaaggatacacaaatcaaatcagggatagtgggtgaggaagtctgcctaacattcaaggaaggattctgaagtgatacaaaatcattgcctttgctatctttagaatggacactttcagccaggcacagttgctcagcctgtaatcccagcactctgagagccccagttgggtggatcacttgaggccagcagcttgagaccaccctgggcaatgtgcagaaaccccaactctactaaaaatacaaaaatagccagttattgtggcacatgcctgtaatcccaactccttgggaggctgaggcacaagaatcacttgaatctgggagccagagtttgtaatgagcgaagatcatgccactgcactctagcctaggcattagagtgataatctgtctgtggaaaataaaaacattcctcttcaaagttttcttctttaaatcataaatgttggaattaatatatcctctttgaaactcactttcttcaagcttctttatttgatggtagtaaatctttgttaagctttatgaggcaagagtaatggaagaagcatattatatatatttatactctaacctcagtgcttgttctagcaagctcaggcatgcgtgaatgtgcccaggcatgttccagcccataccttatatcctttccttattgggaaatgctgttactcctataagcattcttgtaagcaacttcctctttttctttgtctccactatctttacctattgaggacagttttaggttcttagccagttggatgtagcatagactgtgaggtccaaccccagccaatggagatagcacacagcagtagcgacctcatgcttaacagataaatattcctgtctccctttgtttggggtgctctcagctgatgagcaacaccctttctaaagaaattaaagttgtcttgctgagaaaacttttggtctaaatgctgattcttccttgcagcactgaagaagaagcaattatttccaacactttctcatacacaaaaaaagaagaaggtggaagaaaactttcttgtgcaccctatccctcactcagaaagacaacagaaggctcctagtggcaagccctagaggattcatttcttttgggaaccctcttggctgggatactaggactcaggtcaaactcagcattttcagtgtgtgggaagtgtgcttgggtttcactgttacttccaataatgtgatttggtccttggggttcaccaaattttggtatggagtggtgaaccctgttaagtttaagtgtctataaaattaacaaagcaaaataaccattctgccccatggttcagagaccaaatattgtgtaggaaatgctttagcgagagaaacagagaagaataaaaaatgtcctcaagcgctgcattatttcttgttatcgtccagatcttagaggaaaggctttcattttccctcattcagtatgatattagctgtgcatctgtcatttatggcttttattatgttggggtatgttccctgtgtatgtagttttttcagggtttttgttatgaagtgatgttgaactttatcaaacgtttttcagtttcagttgaaacgatcatatgctttttgtccttcattctcttgatatgatgcatcatgttgatgatttccatatggtgcactgtccttgcatcctgggcatgaattccacttgatcatgacaaatgaatttttaatgcattcttgaattccgtttgctggtattttgttgaggatttttgcatcaatattcatcagagatattggcctgcagtttctttttttttcttttttctttgttttgttgtttgtttgtttgtttgttttgatgtgtctatgtctggttttggtatctgggtagtagtgttccatccccttttattttttagaataatttgaataagactggtgttggttctttaaatatttggtagaattccgaagtgaagtcattgggccccgggcttttctttagtggaaggctgtttattatggcttcaatctcgttacttattattggtctattcatgttttgaatttgttccttatttaatcttggtaggctgtgtgtatctaggaatttgtccatttcttttagattttcaaatttattggcacataattgcccattgtagcctctaatcgtcatttgagttcctgcagtaccaattataatgtctccttcttcatttttgattgtatttatttggatcctgcccctttttttcttacttaggctgcctaataatttcttaattttgttgaactttttcttttgtttgtctcgctctgccaccaggctggagtgtagtggtgtgatcttggctcactggaacctccgtctcccaggttcaagcaattctcctgcctcaccctcccaaatagctgggactacaggcaagtgccaccactcccagctaatttttgtatttttagtagacacgggttttcaccatgttggccaggatggtctcgatctcttgacttcataatccacctgcctcagcctcccaaagtgctgggattacaggcatgagccactgcgcccagcctaattttgtttaaattttcaagaaatcaacttcttctttcattgatttctgtattttttatttccattttatttatttaaactctaagctttattctatcttcttctcattttagctttggtatgcttattgcctctctagctctttaatgtgcattgttagattgtttatttgaagttcttcctctctacaccataagacgtaagcatgtcctcattatgtcataagatgtaaccacttacagctataaacttccttcttagttctgcttttgctgtatctcataggctttgttatgttgtgtttccattatcaattgtgtcagaaatttttcaatatttttcttaatttcttcattgagcaactgatcatttgggagcatatttttaaacttccatgtacttacatagtttccaaaatacctcttgtgatcaatttctagttttattccactatggttcaagaagatgcttgatattatttcaattttttttcacattttaagatgtgttttgtgacctaacatatggtctactttttttttttattaaactttaagttgtggggtacatgtgtagaccgtgcagttttgttacataggtatacacgtgccatggtggtttgctgctcccattaacctgtcatctacattaggtacttctcataatgctatccctcccctaacctccaccctctgacaggacctggtgtgtgatgttcccctccctgtgtccatgtgatctatttttgagaatgatccatgtggattagaatgctgtggaaaagactttggattcctaatatccagggagggagacgatgatattactttcaatatcacacgggtgtacacactctctgtgacattgttcctaatatccagtggaagagaggatgatataacacccagggagggagaggatgatattactcttaatattgcagggtgtgtacccatgcctatgatattgttcctaatatcaggagggggagaggatgatattactcagaatatggcagggggtgtacacacactctgtgacatggttcttaatatacaggggagaatgggacaatattactctcaatatcgcagggggcgtacaaccctgtgatttgttcctaatatacaaaaggggacagtatgatattgttcctaaaatcgcagaaggtgtacaacgccctgtgatattgttcctaatatccagggcgggagaggatgatattacccccaatatcacagggggtgtgcactttccctgttacattgttcctatgatccgagtggggggaaatgacattagtcccaatatcgcaggatgtgtacactactcccccatgatattgttcctaatatcaagggggagagaggaggatattactcccaatatcgcaagggaggtacatcctccatgcaatattgttcgtaatattcaggaggagagaggaagatattactctcaatatcgcagaaagtggacacccaccctgtgatgttcttcataatatccagggaagcagacgattatatgactttcaatatcgctgggagtgtacatcccttttgggatattgtttctaatatccaggaagggagaggattatattacttccagtattgcagccagtgtacacatttcttgtgatattgttcctaatatccagaaagggaaaggatgatattactcccaatattgcaggtggtgtacacccccctctgatattgttccttacatcaaggaaaagaaagaagaatattactcccaatatcgaagagagtgtacacccctcctgtgatattgtatttaatatccatggggaaagaggatgttgttactcccaatatcgcagggggtttacacccacactgtgatattgttcctaaaatccagtgaaggagaaaataatattgctcccaatattgcagggtgtatacaggccctcccccgttatattgctcctaatatccagcggtggagaggatattactttcaatttttgcagggagtgtgtaccccctctctgatatttttctaatatcaaggatgggaaaggatgccattactcccaatatcgcaggaggtgtacatgccctgtgatattgttcctaatatccagggaggtagaggatgatattactttcaatattgcaggggctgtacaccctctatgatgttgttattaatatttaggttgggagaaaatgatatttttcctaatatcctgggaaggaaaggatgatattactgtaaatattccagggagtgtacaccttcctaatattctaatattgttcctaatatccaggggtgggagaggattatattactcccaatatcgcagtgggtgtacacccctcctgtgatgttgtttctaatatccaagcgaggagaaaatgatatcactctcaataccgcagggggtgtacaccttccccatcatatcgttcctaatattcagagggaaagaagatgatgttactttcaatatcgcaggggttgtacacaacccctgtgatatttctcctaatatccaggaagaaagaggatgatattgctcccattatagcagacggtatacgcctccctgtaacattgtttctaatatcaagactgggagaggatgatatcacttccagtatcgcaaggggtgtacacctcccccgtgatattgttactaatatccagggggaagaggataatattactttcaatattgcaggggctgtacacccccgtgatattgttgttaatatttaggttgggagaaaatgatattagtccaaatatcgcagagagtgtacacacttccgataatattgttcttaatatccatgggggagacgatgatattacacccaatatcgcagggggtgtagtctccccttgtgatattgtccctaatattcagggaagtaaacgatgatgttagtgtgaatattccagggagtgtacaccccctttgtgatattgtcctaatatccgcaggagagaagataatattactcccaatatcgcagggggtgaacacaccccctgtgatattgtttctaatatccaagcgaggagaaaataatattactcccaatgtctcaggggatatacaccttccctatgatattgtttctaatattcaggtggaaaacgggtgatattactcctaatatccaggaagaaaggggattatgttactccccttatagcagggggtatacacctcccctgtaatattgttcctaatatcaaggctgggatatacgtggggggaaggatgatattactcccaatatcacaggggttataaaaccttctgtgatattgctcctaataaccatggcggaagaagatgatattactcctaatattgcaggaggtgtacactcccccattatgttgttcctagtatgcagaaaaggagaggatgacattattgccaatatcgcagggtgtgtacaccacccatgatattgttcctaatatttagagggacagaggatgatattactcccaatatcgcagggggtgtacacgcatcccctgtgatattgttcttgaaatcgaggggaaagagaattatatttctctaaatattgcagagggtgtacaccgccccctgtgatattgttcctaatagccgggggcggggggagataattaaattactttcaatatctcagagagtgtacatcccccttgtgacattgttcctaatatccagagcaaaagagaatgatattcctcccagtatcgcaggaagtgtacatttaacctgtaatattgtttctaatatccagggggaagagaatagtaatactcccaatatcgtaggggttgtacaccttttctgtgatattgttgcaaatatttagaagagagagagaatattactcgcaatatcacagggaatgtatacttcccctgtgatattgttctaatatctagaaaaagagaggataatattactcctaatattgcagggggtgtacacccccacttgtgatattgttcctaatataaaggaaggtcgaaaaacaaacggggagcccagggggaaggaaggcaggcgaggaagaggcagcgccggggcgccggagggagcagccgggccgcggaagcgcgagcacgagaccggtcgcggtcgcagtcgcatttttgccgttgtcgcggccgccgccgccgaggcttacccggggatgtctgagcccgcgcctcgcggcccccaagctccacgctgcgcccgctgtcccggcctctaagggccgccacgtccctgcggcgcgcgcaggcagaaagcggcttcgtgccggcggagggggcccgggcgggccgggaaaggctgccccaggccccgcgcctaccccatcaccgcggccggcgccgggccgggaggatgagcggtgtggggctctgaagcatggagggggttttgtacaagtggaccaactatctcacaggttggcagcctcgttggtttgttttagataatggaatcttatcctattatgattcacaagatgatgtttgcaaagggagcaaaggaagcataaagatggcagtttgtgaaattaaaggtgacagctttggaggggaccacccttgattggatacataaattctgttcattcagcagacaacacaagaatggaattaatcattcctggagagcagcatttctacatgaaggcagtgaacgcagctgaaagacagaggtggctggtcgctctggggagctccaaagcatgtttgactgatacaaggactaaaaacgaaaaagaaagaagtgaaaccagtgaatcgctgaaaaccaaaatgtctgaacttcgcctctactgtgacctcttaatgcagcaagttcatacgatacaggaatttgttcaccacgatgagaatcattcatctcctagtgcagagaacatcaatgaagcctcttctctgcttagtgccacgtgtaacacgttcatcacaacgcttgaggaatgtgtgaagatagccaatgccaggtttaaacctgagatgtttcaacggcaccatccggatcccttagtttctcctgtgtcaccttctcctgttcaaatgaggaagcgttctgtcagccaccctggttcttgcaccagggaggagtagccactgtataaaagaaccagtatctgcacttcaccgactctcccagcgacgccgaagaacctactcagatacagattcttgtagtgatattcctcttgaagacccagatagacctgttcactgttcaaaaaatacacttaatggagatttggcatcagcaaccattcctgaagaaagcagacttatggccaaaaaacaatctgaatcagaagatactcttccatccttctcttcctgaagaaactgtagtgtccaactttctctaagtattgctatgcaaaagctgctgtaattgaactattgttatagggagtagttttttcccttaggactctgcactttatagaatattgtaaaacagacaaacaagaaaacaaaccacatacttttgaagcgtgttttatctttatatagtttgtttgcaagagtattttcctaataacttcacagtatgaatgtgcatcttttttttctttttttaacaaatgatggtgtaacattttgacatccataaggacaaatgtagatatttttctaaaaaaccgtgaggggactgacagcttggtcagggtgtattgtagcttataaacatgaaatcttacaaggtttcagtttgacagaagtgtgatatatgtaacttgtgccatggaccaaatggtcactttaccacagctaaaaatgagttatgatagcagcttgatggtgattgcattgtattcctttaatcaaaaaggaaacgcaatattctaagtatctttagcccaaataccatgacatattgagcatctttaaataaccagactgtattgtccttcatatgtgaagttgacactactgatttgtcaataccaaattttgggttaaagtgtttaatttttatttatttattttcttgttgcctcaaaagatgattgcattctaacttttgtgacctaccaaatttaagatgtgtatacattgttctttacgttgttctagaaaagagattttaatgctgtagtgacttagctcacttacatcagagaaataaacaactttcaatggaaaaaaatatatataaaggaaggaagaggatgatattacttctcatatagaaggggttgtacaccccccttgtgatattgttcctaatattcagggagggagaggattatattactcccaatatagcagggagtgtacacccccccccccgtgataatgttcctaatattcagggaagcagaggatgatattactttcaatatcacagggggtgtgctgtccccctgttatattgttcttaatattcaggggggagaggatattattatgcccgatatcacaggagaagtacaccccacaagtgatattgttcctaatatccaggggtaaagaggatgatatcgcaggtggtgtacacccctccccgtgatattgtttctaatataaagaaggagagagcatgatattactcccaatatcgctggaggtctacaccccccttgtgatactgttcctaatatccaggaagggaaacaatgatattgctgtgaatattccagggggtgtacacccctttgtaatattgttcctcatatccagggggtagagaggatgatattactcccaatatcgcagggggtgcacggccccactgtgatattgtttttcatatccaggaggggagaggatgacattactctcaatatggcagggggcgaacaccccctgtgatattgtgctagttaggttgggagaaaatgatattactcccaatatcgcagggggtgtacaccgctcctgtgatattgttcctaatatccatgacgggagaggatattactcccaatatcgcagggggtgtacctctcccctgtgggattgttcacagtatccaaaagggaagaggatgatgttactcccaatatcacagggagtgtacaccaccattgtgatattgttcctaatagccagggaagaaaacgatgatattattgtgaatattacagggggtgtacacaccccctgtgatatggtttttaatatacaggttggaaaaggatgatattactcccaatatcacaaaaggtgtacacacccccccatgatattgttcttaatacttcggtggggagaaaatgatattagtctccatatcacaggggtgtgaactcctccggtgatattgtttttaatatcaagaggggaggagatgatattgctttcaatatcgctgggggtgtacatccctcctgtgatattgttccttatatccaggcgaggggaaaataatattactcccaatagtacacaccccatgtggtattgttcctaatactcagggggaaagaagataatattactttcaatatcacagggtttgtacacctttcctgtggtatagttttcaatatccagggggaaggtacatgatattactcccattgcagcaaggggtgtacacacctcctgtgatattgttcctaatatccagaagtggtgaggatgatattactcccagggggtgtacaccccacctatgatattgtttctaatatccaggggaaaagagtgtgatattatgcccaatatcgcagagggtgtacacttatcctgggatattgtttctagtatttggggagggaggagaggatgctattattctcaatatcgcagaaattgtacacccccgctgtgatattcttcataataatcagggaaaaagaggatgatattactaccaatattgcagggggttacacttcccctttggtagtgttcctaatatccaggaagaaagaggatgatattaatcccattttccaggaagtgtacacccaccgtgtcatgttgttcctaatatccagcagggaagaggatgatattactcccaatatcggagagggtgtacacttcccctgttatattgtttctaatacccagggggaagaaggatgacattactgccaatatcacagggtgtgtaccccaccctgctattgttcctaatattcaaaaggaaagatgaaaatattactcccaatatctcagggtgtgtacacctctcctgtgatatcgttcctaatatccacaggaagagagaatattactctcaatattgcaggggggtgtacacccccctgtgatattgttccaaatattcgggcggggagaggatgatattagtcccaatatcgcagggggtgtgcaccaacctgtgatattgttcctaatatccatgcgggggaggacgatatcactctcaatgtcgcaggaagtgtacacctctcttgttatatttttcttaatatccaggagggaaaagatgatattactgccaatatcgcagggtgtgtccaccccccttttatattgttcctaatatccaatggaaaagaggatgacattgctctccatatcccagaaggtgtacaacgcccctgtaatattgttcctaatattttgggggaagagaggatgatataacttataatatcacaggaggtgtacaccacccctatgtattgttcctaatatcctttaagggagaggatgatattactcccaatatctcaggtggtgcctattccccctgtgatattgtttttaatatccaggggaagagagtatgatattacgcccaatatcgcagggggcatacaccctctctgagatattgttcataatatatagagggagagaggatgatattacttccaatatcagaggtggggtacaccccccggttatattattcttgatatccaggaggggagaggttgatattactggatatatagcagggagtgttcacatcttctgtgatactgttcctaatatccagaaaagtagaggatgatattactcccaatatcgcagaacgtgtacacctccctgtgatattgatcctaacattcaaaggggagaggatgatattactcaaaacatcacagggcatgtacactcccctgtgatattgttcctagtatccagaagggagcaagataatattactttcaatatcgcagggggtgtacacccctctttggtatgtttcctaatatccagaaggaaagagggtgctattactttccatattgcaaggggtgtacacccccctgtggtatggttcataatatccagggagggaaagggtgctattattccccatatcgcgaggcatgtacaccctgctgcggtacggttcctaatatccagggggaaagaggatgctattacttcccatatcgcggggtgtgtacacccccgtgtggtatgttttgtaatctccgggaacgaagagggtgttattacccctcatatcgctggaaatgtacactcccctgtggtacggttcacaatatccaggggattgagggtgctattactccccatatcgcggggggagtgcacctccctgtggtatggttcgaaatatccagggtaagagagggtgctattattccccattttgcaggaggcgtacacccctctatggtatgttttgtaatatcccaggtaaggggtgctattgagagaagagagcaaaagaccccccccatattgttctgtattattttatactcagtacctgttttaagaagaaacaaggaagcgaaaccaaaggcaggcagcccggcgccaggcaccagatccaaaaccagacccgaaaccaggcctgggccttcctgaccttagcctgaaagttaaaattcaacccatgacctagcaactgatgttatccatagattccagacattgtatggaaggacattgtgaaatttcttgttctgttctgtttcactctgagtactggtgcatgcagcccttgtcacatacccactagattgctcaatcaatcatggccctttcatgtaaaaaccttagtgttgtgagcccttaaaaaggacagaaattgtgcactcaacaagcttggattttgatactctagtctgctgatgcttccagctgattaaaagccacttccttcactacctcggtgtctgtgggattttgtccgcggctcctcctgctacactgtgactccccttatagagaggggtgtacacccccctttggttcctaatatccagcgggggagtaggtgctattactccccatattgcggggagtgtacacccccttgtagtacggatcgtaaaatcaaggagggagagaaggtgtaattatccccatatcacagggagtgtacacccctttgtggtatagtttgtaatatccacgacgggagagaatgctattactccccatatcgtggagggtgtacaccgccctgtagtatggttcgtaatatccggaaggggagaggttgctattactccccatatggtgggaagtgtacacccccatgtgatatggttcataatatccaggggggtagaggatgatattacccacaatatcatagaaggtgcacacccttttgtgatattgtccataaaatccagaaggggagaggatgatattacttccaatatcacagggggtgtgtagccccatatgatattgtttgtaatatcaaggtagggagaggatgctattccttacaatagctcaaggggtgtaaccttcttgtgatattgtttgtaatatccagaaggggagaagataatttttttattttaaaagtaaactttaatgtcaaaaatgcaaacttgagaagggcagaaagatcaaacagaaggctgccacttcacaattggagggttgcacagtggccgggcagaggcgctcctcactccccagacggtgaggcagccgggcagaggtgctcctcacttccgagatgttgcaggagccgggcagaggtgctcctcacttcccagaacagggggctgccgggcagaggtgctcctcactgcccagacggtttgcaggcctggcagaggcactcctcacttcccaaacggagcagcggcaagccagaggcgctccacacttcccagatggtggggcagccgggcagaggcgatcctcacttctcagagggtagggcggcccagcagaggcgctcctcacttcccacatggtggggcggcaggctagaggcgatcctcacttcccagacggtggtgtggccatgcagaggtgctcctcacttcccagatggtgtggccgccgagctgaggcactcctcacttccctgacagtggggcggctgggcagaggcgctcctcacttcccagacacttggactccgggcagagactctcctcatttcccagatggtggggctgccgggcagaggcgctcctcacttcccagacggttcagaggccgggcagaggcgctctggggagaggataatgttactcccaatatcgcagggggtgcacactccctgtgatattgttccgaatatccagagggggaaaggatgatatagctcccaaaatcgtggggagtgtacacccccctgtgatcttgtttgtaataccaagaagaaaagagaatgctattatttccaatatagcagggggagtacaaccccctgtgatattgttcgtaatatctagggggagagaaaattatattagtcttaatatctcaggggacgttcatccccctgtaatattgttggtaatattcagaatggagaagatgatattgttcttaaaatacaggaaaaaatatgataatattacttccaatatcgaagggggtgtacactctcctgtgatattgttcccaatatccagaatgaaagaggatgctattactcccaatatcccagggagtgtacacccctttgccatattgttcataatatccaggggaagacaggataacattactcccaatatcaccgggggtgtccacccactagtgatatttattgttcatcatatccagaaaaggagaggatgatattactcccaatattgcaggtggtgtacggtccctgtgatattctttgaaatatctagaaaaggagaggatgatatcactccgagtatcacagggggtgtacacccccctgtgatattgttcgtaatatccaggggagaaaaggatgatataattgccaatatttcaggggatgtgcacctccctgtgatattgtttgtaatatccaggggtggagaggatgatattactcaaaataacgtaaacatcctgtgtgtacatcccctgtgatattgtttataatatccaggggggtagaagatgacattacccccaatatcacagagtgtacacacccctgggatactgttcataatatccaggcgggaaagaatgaactacttccaatatcgcaggatatgtacacccccctgtgatatatttcctaatatttatgtgggtaaggatattacccccaatatcacagaaggtgtacatcctctttgtgatattattcctaacatccaggaaaggagagaatgatattactcccagtatcgcagggggtgtacaccacccctgtgatattgttgctaatatccagggggagaggataatattactcccaaaatcacaggggacgtacactcctcctgagatattgttcctaatattcatggggaaaagaatgctactactccaaatacagcagagggtgtacaccatccccgtgatattgttttttatatccaaagggtgaaaggctgatattactcccaatatcgcagggggtgtacaggccccccatgatatcattcttaatatccagggaggcaaagaatgatgttactcccaatattgcaggctgtatacaccccccgtgatattgttcctaatatccagagtaagagaggatgacattgctcccaatattgcaggggttgcacgcacgccctgtgataatattactcccaatatcaacagtgggtgtacactcctcctgtgatattgtttgttatatctaagaaagaagaggatgatattactgtcaatatcacagaaggtgtacagccccttgtgatgttgtttctaatatccagcggtgagaggatggtattactcgcaatattgtagggggtgtccaacggccctgtgatattgtttctcatattcaaaaaggaaaagaataatataactccaaatatcgcagggtgtgtacacttccctgtgatattgatcctaatatccaggaagagagaggatgatattaatcccaatatcacagggggtgtacatcgcttctgtgatattcttcctaatatccagggggggaggggatgctattactcttaaaatcgcagggaacttacactcccactatgatatttttcctaatatccaggaagggagaaaatgatattactcctaatatcacatatcacaatgggtgtacatctccccgtgatattgtttctaatatcaaggatgggagaaaattatattactctcaatatcgcagggggtgtgcacacctcctgtgatattgttcctagtatccagcggaggagatgatattactttaaatattgtagaaggtgtacaacccccctttgatattgttcctaatatccagggggaaaggagatgatattactcctaatatcgcaggggctgtacaaccctatgtgatattgtttcttctaatatccaggggtggagaagataatattactcctaaaatcgaaggggacatacactccccctgtgatatttttcctaatatccagaaggaaagaggatgatattactcctaatattacaagaaatgtatacctgtcctgtgatattgttcctaatatccagaggggtaaatgattatattactcccaatatcgcaggggtgtacaccttccctgagatattgtttctaatatgcagtggaggagaggatggtattactcccaacatcacaggagatgtaaactccccttgtgatattcttcctaatgttcaggacgaaggagggtaatattactcactgtattgcagcagggggtgtagagccccctgtgatattgtttttaatattcaaggttggagaaaataatattccttccaatatcgcatggggtgtacacccttctttttatatagtttctaatatctggggggagaggatgatattactcccaatatcgcagggggattacacccccactgtgatattgtttttaatatccagggtgggagaggataatattactccaaatatcccagggctatacaccctccgtgtgatattgtttctaatatccagaggaagagaagatgatattactcccaatgtcacagggtgtgtacaggccttctttgatattgttcttaatatccatgagggagaggatgatattactcccaatatcgcaaagactgtacaccctttctgtgatattgcttccaatatccagggagggagaggatattacactcaggatcacagggggtgtacaccccaacctgtgatattgtttctaatatctagggaaaatgagggtgatattactatcaatatcacaggaggtgtacactcccttatgatattgttcctaatatccaggagaatgacaggataatattactcccaatatcgcgggtggtgtctccccccactccgtgatattgttcctaatacccagagggggagagaatcatattactcccaatatcgcaggggatgtacacctacatccggcggagtagaagataatattactcacaatatcgcaagaagtgttcaccttccctgttatattgttgctaatatccagggagtgagaagatgatattactttcaatactgagcgtgtacactacccctgtgatattgtttctcatatccagtagaggagaaaatcatgttactcccaatattgcaggggtgaacacctcctttgtgatatttttcctaatatcaggaaagggagagtatgatattacccttaatattgacaggggtgtacacccccctttgatattgttccaatatccaggggggcagaggataatattattcccaatatcgcagagggtgtacaccccccgtgatattgttcctaatatccagagaaataaaaaatagtattatttccaatatcacagggcgtacattttccctgtaattttgttcctaatatctggggggtggggtggcaggataatattactctcaatattggagagggtgtacacccccctgtgatattgttcctaatattcagggtgggagagaatgatgttactcccaatatctcaggagtcgtatacacccccttgtgatattttttctaatatccaggaggcagaggatgatattgctcccaatatcgcagggggtatacacccgagctgtgatattgtttctaatatgcaatatgggggaaggatgattttactttcaatatcgcagggaatgtacactttccttgtgattttgttcctaatatccaggggtggagaagatgctattactatattactcctcatatcgcaggcggtgtacaactccctgtgatatggttcagaatatccagagtgaaaaaggagggtgacattactcccaatatcgggggggtgtacacccctttgtgatgtggttggtaatatccaggggggcagatgagggtgatatcactccccatatcgtggaaggcgtccacttttttgtgatgtggttctttatatcccgaggggagaaggtgatattactccccatatcgcgaagggcatacacccccctgtgatatagctcataatattccggagagtggaggaagatactatgccctatatcgcgggtggcctacaaccccctatggtttggcttataatatccaggggggagagggtaatattgctccccatattgtggagacgtacagccccctgtgatatggtttgtaatatctttggggggcgagggtgatattactccccatatcgcggggagcatacacccccgtgatctggttcatagtatctcaaaggaagaagttgatgtgtacaacttaagggaaaaagttgaagtgaagtgtacacacgccctgtgacgtggttcataatatccaggcgggggagaggagagtgatatttactccccatatcgcgggtgttgtaaactcccctgtgatatagttcataatatccaggggagagaggagggtgatattgctcctcatatcgcgaagggtgtacaaccccctgtgatatggttcataatatccagaagggtagaggacgatgatattactccacatatcttgggaggtgtgatatggttcgtaatatccagcgatgagagaatgatattactccccatatcgcaaaaggtgtgatagggtttgtaatatcctgagggggagagggtgatattaatccctatattgcagaaggactacaccctcccatgacatggtttgtaatatcccagggggtagagtgtgatattactttccatatcacagggggtgtgatatgattcgtaatattcgaagggggagagggtgacactactctccatatcacggggtgtgtgatatggttcttaatatcccaggggttagaggttgatattaccccctttttggggggtgtgtacaccccctgtgatatggttcgtaatatcccgggggagacagggtgacattattccccatatcgaggggatcgtacaccccctgtggtgtggttcataatatccctagggggagatggtgatattactccccatatcagggggcgtgcactcttctgtggtataattagtaatatccagggggcagaggtcgatattcgtttccatatcatgaagggagtacacttccctgtgatatggttcctaatatccaggggggagagggtgatattattccccatattgcggggggacatacaacccctgtgatatggttcataataaccagaaaagaagagggtgatattaatccccgtattgcagagggcatacaccccccctgtgatatggtttgtaatatctaggggaggaaaaggtgatattactttccatattgctgggtgcagacacccctttatgatatggttcataatatccaagttggagagggtgatattacttcccatatcatgggaggtatacccttccctgtgatatggttcgtaatatccagaaggggagagattgatattactccccatattgtggggggcgtacaccttcctgtgatacggtttgtaatatctaggggatatagtgggtgatattactcaccatatcacgggggttgtaacatggtttgtaatatccaggggaggagagggtaatgttactccccatatctcggggcatgtacaccctcctgtgacatggttcgtaatatccaggtcgggagagggtgatattactcctcatattgccgggggtgtgttatggttcataatatcctggggaaggaggctgctatcactctccacatcttgggggatgtacactctcctgtgatatggttcataatatccagggtgggtgagggtaatattactccccatatcgcgggaagtgtacatacccctgtaatattgtttgtaatagaagagagggtgatattactccccacatcgcgggtggtgcccacccccctgtgatatggtttggaatatccagggggatgaggagggtgatattactccccatatctcggtgggagtacatccctctttgatcaagttcataatatccaaaaggaaacaggagagtgatattactccccatatcgccgggggtgtacacgggagggggagtacacccccggcgatatggtctgtaatatccagggaaggagaggagggtgatattactcaccatatcgcaggtggtctacatttacctgtgaaacagtttgtaatatccagggggggaaatgagaatgattttttttttttgagtctcactgtgtcacccaggttggagtgcagtggcacgatcttggctcactgcaacccccgcctcctggactcaagcaattctcctctcccagcctcctgaatagctgggactacaggcgcaccccacaacgtctggctaatttttgtatttttattagagacggggtttcaccatattggccaggctgatctcgaactcctgaccctgtgatccatccgcctcggcctccaaaagtgctgagattacagatgtgagccaccacgcatggcccaaggagaacgatattactccccatatcccagggggtgtatatccccctgtgatatggttcagaatatccggaaggaaagacagggatattacttcccatatcgcaaggggtgtgacatggttcgtaatatcccatgggggagagggtaatattactcttcgtattgtgaagggcatacactcccctgtgatacagttcataatattccggggagtagaggaagatattatgctccatatcgcgggtggcataagccccctgtggtttggttcataatatccagggaggagagggtaatattactccccatattgtggggacgtacaccctcctgtgatatggtttgtaatatcccagaggggagagagtgatattactccccatattgcagggacatacacccccctgtgatatggttcaaaatgtcttttttttttgaaggactggttctttatttcaaaaagacacttgtcaatattcattatcaaaacagttgcactattgatttctctttctcccaatcggccccaagtagaccacatcaaaggagagtacatattaagccaataagctgtaggatgtacacctaacagacctcctagaaaccttaccagaaaatggggacagggtagggaaagaaactttaaaagatcaacaaactgccagcccacggactgcaggggctgtcacagccagatggggtggccagggtgccacaaacccaaagaagcaaagtttcaaaataatataaaatttaaaaagttttgtacataagctattcaagatttctccagcactgactgatacaaagcacaatgagatggcacttgtagagacagcagcttcaaactcagaaaagggtaatgagatgagtttcacatggctaaatcagtggcaaaaacacaatcttctttctttctttctttctttcaaggaggcaagaaaagcaattaagtgctcacctcaacataaggggaacatgatccattctgtaagcagttgggagggggtagagatggaacaaaattttggtctcagaggtcttgccatcttaatttggtcacttctaatgaaaaaaataaaaaatagaaataacattatccaaaggtatcttaaagctgaaaacttgaacagcacattttttgttgttgttgtttggctaactcctcctggaaccacctttctggcttagctagtactttgtacagagcaatgaggcttcccatagtggagtctccctgggctctgtttggctctcagcaaggcaggcctataccttttcctctcctccatggagagaggaatatgcattaaggtgaaaaatcaccttccaaaagtgagaaagggattcgatcgctgcttcagggctgtggtattatatggaatgttttacaaaaggttgctacaaaacaacaaaagaggtaattacaaaatgtgtacatcacaacatactttttaaagacattatgcattgtgctcacattcccttaaatgttgtttccaaaggtgctcagcctctagcccagctggaatctccgggaagaggcggacagtttggtgaaaaagacacagggaaggagcgggcggcggaaggagggggcggcgaaaggagaaagcagccttccagttaaagatcagccctcaattaaaggtcagcttcgggcaggctggcctcaggcggagtctggttcagagggaggagcagcagcagggtgagactgaggcgttctacatctcattcaggtcaagcagagtctggtccagcatcctttgtgtacagaggtgctcccctttggtgcatttcagtttatcttccaagtcatcaattgtcttttccagcttggctaccgatctctcagcaaactcagcatgggtctccgcctcctttattttatcagtaagaatcttgatctcttcctcatatttgtcttctttttgagagtacttttcttcagcagcactcagacacttcaggttctggtccatcagtctaatctgctcatccatctctcggcaaagggattctgccagctcagctcgttcctctgtgcgttccaagtctccttcaatgatcaccaacttacgagccacctcttcatacttcctatctgcctcttctgcaatgtgcttagcttctctgagttggatttcctggagttccatcttttcttcatcttttaaggcccggttttcaataaccttcttacctctctcactctcatcagcagctttttccgcttcttccagcttttgcagggcagtagccaggtgctcctgagcacggtccagctcctcttcaaccagctggatcccacgttcaaggaggccacctcagcctcagcctgttcccgggcccacctttctccctcaacttctcgctggaggcgctcagctcgctcctctgcatcatctgcctgctgctgcagaacctggatcttgcgcttcaccgcctcgatggtggtgatcccagccatggtgcccacccagctactgctagagctccggttcctgcctcctccgatcggcgttgcagcctcctctcacccttacttccgcctcggttcaaaatatcttaagggaaggagttgatattactccccacatcacgggaagtttacatcccctggtgatatggtttgtaatatcccagggtggatagggtgatattactctccatatcgcgaaggagtactcccccctgtgatatggttcataatatccttggggggagagtgtgatattactccccatatcgcgagggccatatactcctttgtgacatggttcgaaatatcccggtgggggagggggtagagggtaatattactccccatacagcgaagagcatacgcccttctgtggcaaggttagtaatacttcagggaaaagagtgcaatattacttttcatattgcagggaacatacactcccctgtgacatggttcgtaatatcccgggggctgagagggtgatatttctccccatatcaccgggggcctacacctgggtgtgatatggctcataatatacagggagggagagggtgatattactccacataccgagtgaggggttacacaccctcgtgacatgttcgaaataccccaaggaggagacaatgatattactttccctgtcgcgggggctacaccctcccagtgatatggttcacaatatcccggggtggagagggtgatattactccctatatcaccggggggtgtacacttccctgggaaatggtttacagtatccccggggggagagggtactattactccccatatcacgttacatatcagggtacacccccacgtgatatggtttgtaacatcccaggaggaagaaaatgatattactccccatatcgcggtggcatacacccctccccgttaaatggttcataatatcttggggtggagagggtgatattactccccatatcacgtggggcatacaccccactatgatatggttcataatatcccggaggggagagggagatattactctccatgtcgcggggggcatatacacccctgtgatatggtttgtgatatcccgggggcggagagggagatattactctccatatcgtggggtcgtacacttttctgtgatatgattcgtaatatccagacggggagagggtgatattacttcccatattgcgggggcgtacacccctctgtgatatggttcataatatcccgaagaaaagagggtgatattactcctcatatcgcggggaacacacaccaccctgtgatatggtttgtaatattcagcgggggagagagtaatattactccctgtatctcggatggcgtacactcccctgtgatatggttcataatatccagaagaaaagagggtgatattactccccatattccagggaatgtacaccaccctttgaatatggttcgtaatatccaggaggggagagggtaatattgctcccaatatcgaaggaggtgttatacggttagtaatatccagagaaggagagggtgacattactccccacatcgtggtgggtgtgcacccacctgtgatatggttcataatattcaggttaagagaggtgatattgctttccatatcgccaagggtgtacactcccgtgaaatacagttcgtaatatccaaaaggggagagggtgatattactcccatatcgtggggggtgtacacccctctgtgatatggttcataatatccagggtggaataaggtggtattactccctgtatctcggggcatgtacatcgcctgtgatatgattcataatatccagaagaagagagggtgatattaatctccatattgctgggggtgtacaaccccctgttgtatggtttgttacactgagttggggagagggttacattactctcaatatcgagtggggcatacacacttatgtgatatggttcataatatcccagggaggagagggtgatattactccccatatcgcgggaggcatacaccccaatgtgatatggtttgtaatatctacatttttttttttgagacgaagtctcgctcttgtcccccaggctggagtatgatggccggatctcggctcactgcaacctcagcctcccgggttcaagcgattctcctgccttggtcccccaagaagttgggattacaggcgcacaccaccacgcccggctactttttgtatttttagtagagaaggggtttcaccatgttggccaggctggtctagaactcctgacctcagatgatccacctgcctcggcctcccaaagtgctgggattacaggcgtgagccactgcacctggcctggtttgtaatatctatgaagggggaaggtgatattactttccatatcacgggaggcgtacaccacgatgtgatatggtttgtaatatccagggggtatactgggtgatattactccccatatcgcggggagtgtatacccttttgtgatatggttcctaatattaagctgaggagaaggtaatattactccccatatcgcaggggtttttatatggttcataatattcaggaagagagagggtgacattactctccatatcacggggtgtgtactcccccatgtgatatggtttgtaatatccagggaaggagaggttaatattactccccatatcgcagggggtgtacacctctctgtggtttgtaatatccaaagggaagaggatgatattatcttcaatatcttggggggatacagtccccagtgatattgttcataatatccagagggggaggggatgatattactcccaatattgcaggtggtgtacaaccccctgtgatattctttataatatagagggggatgatgatattactcccaatatagtaaacaacctgtgtgtacaccccctgtgatattgtttataatatccaagggtggaaaggatgatattactcctcatatcgcagggggtgtatacccctctgtgacattgttcctaatattcaggggaggagaagatgatactactcctcatatcacaggggatgtacacccccctgtgatacttttggtaatatccaggggaggagaaaattatattattccccatgtcacagagggtgtacaccccgctgtgatagtgttcataatatccaggtgaaaagaggatgatattactccgaatatctcaggaagtgtacacccttctgtgatattgttcataatatccaaaggtggagaggaggatactactccccatatcgcagtgggtgtacacccccctgtgatatggttcataatatccaatgtaggagaggatgatattactttccatatcgcggagagtgtacatccccctgttatattgtttgtaatattcagggagaaagaggatactactactccccatatcacacggggtgtatattcccctgtgatatggttcctgatatccaagagatattataatcctctcttggattatgctacctctcatatcgcatggggtgtacacacactttgtgatatcgtttgtcatatccaaggagggagaggattatattaatcccaagatcacggggggtgtacaccctcctgtgatattgtttgtaatattaaggggggagaggataatattactcccaatataattaacaccctgtgtgtactcctccttgtaatattgttcataatatccaatgggggagacgatgatattactttcaatatcgcagaggatgtacatccctttgtaacaatgtttgtaatataaaaggcaagagaggatgatactacttccaaaattgcaggacatgtacaccccccggtgatattgttcctaatatccagtggggaagaggatgatagtagtcccaatatcgcaaagggtgtacacaccccctgggatattgttcctaatataaaaggaggagaggatgctattattcccaatatcacagaaggtgtaaaatcccctgtgatattgttcgtaatattcaggaggggagaggattatattactcccaatatcacagggtgtgtacacagggaggggcaagggccagaagcgggcgggaatccccatgtttgggcggacccagtttctaatggccagcatttgccaatcaaagcttaccagagaactctaaaagccagggctttcctgctagacaagactcatttctggaactgctttaaaaagaaacaaaacttcccaaggaccccttttcctctctgtctgcctaaaataatgttttaaaaactcctaaagcagctgaattcagcccccttcctgggggaatgtatagacggaactcccacctttcccggcatcccaaggccagagtatgtgaaactcctgggtctctatgtgtgtctgagcggctgctctgccaacactccacacagccctgtgtcctggacccaaggcccttatgacctgagctcaagaggggatctcctgatccatgggttgcaaagatccatgggagaagcatggtttctggggcggggtcacacgctcagtcactgtttccctcggatgccggagatggttcctttggctctctgccaatacagggtgaatcatcatccatccctcttttctttgttctcccgggtcaagttgtttgcctagtcagtcccaatgtgagaacctgaatatttcagttgacgcgctgacttcaaaatccccgggcttcgggaggcggagcttgcagtgagccgagatcccgccactgcactccagcctgggcgacagagcgagactccgtctcaaaaaaaaaaaaaaaaaaaaaaaaaaaaaagtccccgggcttttcttttcactcagtggaaggcagctgcttctaattggccatcttggcccgcccccaccacgtgaccttctgtaaaatgcctccactctccaggaacgctctcattatataactttgcctgaaaccaacagcacgctcattgcacatatcatgggctcatttatttcacttataaagaacctggccaaggaagagatagtgcctaaagtggccagtattctgaccgatatgttagaaaaatggtgtgccgaccaattcatgacatgtgtcccaaaactagcaacggaaattgtattcgccgtgttgaggtctctaatccagatgatgctcatctatgtactggaaaaggcagagtcctttcctgacaagctgctgaaactcttcagaaacatctcatatttcctgaagaagatgatgtctggacaagcagcacaggtcgttcagatttaactttctattcatatatccagcacgatattcgcacaattgtcacgaaaccttaccagttgatgagtcctgcacatttcctttaatttcaggaggaagagggtaatccggatgagttttctgacctactctgctgctgtgattaaacaaccaccaggaaattttgacgacactgttctcctgagctcctccctttcctccgggaacaaaacaattgaatttacaaaaataaagtgttatttgactggagtgaggtctcatgtctgcttatgcggtggctcgctgctcagaacagggtgagtctctgggttgtgtgctgaggaggggaggctctcaatctggagaaaacccactgcaggggacacctccatggggtctgagggactgaggatgaggagccggactgggtctagggaaggaggaggtttcagagggtgaaattctggcactaaagcctgggggtgtttgggaacttcctccttccgaagaagtttcagggagggataaagacaaaccctgggctccttgaggggcccttactaatttgagaggactctatcgggaaggagagtgacaatggcctccttgaggactgaggcccctgaataaatgaggcccagatacagtccatgggggatgagaccttcaagggtcacattttggttgggacagaggaaaagtgcagctctgcagccgcagaggaaaacccggcagtgtgaaagcgaccttggaggggccctgtgcgctctgaatgcgtctgagcccccatcccctgtccccgcctctctttctggattcttccagctcggctgtctccgccatcttctgagcgctccaccctgacttattcaagtttcccttctgccttccaagtactccaaaatctttcagatctgtgtccctacccctgtttttagcatgtgttggggctccaggtccctgaaggtttctggcctgaaatccacctccccagcggagtggactgcgttctagagactccacactccgcgaggttcccaggcccctgagggacaaccgagtggcctgcgcacttcagggctccacactcggcaaggtctttcaagcccttggggtccccttcttagttttttccacctttctgggctgcagtcactccataaatgctgggatctgatccccacccccactctcgtttcctcaattctgcgggctacacgctctggcaaggtcctccgggccctggatcccctccctctccctatgcccacgctcctagtcagcccttctggggtccactattttcaggaactaaccgttctcatggagccttgctaaccggaaagctgtgtggaagaaaggctttgaggatagaggtggagatttggctcttccatagtgccactcacccaccccaccatgctgccactgccagacccggacccctgtttcagaacaagtgaccagattcgctcctggacagccctggacactggccttttctctgaaaactactcaccctttctctagtccccacttcatgccagcctcataccctcttccttcccccacgctggcttccgggatcctcctctgctcagacaacctcttctgtgtcccacccccgtttttagaatgctttggggcaccaggttgggggaaggtttctggcctgatatccatctctttccaaactcccttcttcccttgaaaggcttcttgccttcagccccacttctggctccgaggtttcaggacaccctcctcttcatcctcattcttttgaccaccagctttttaggaattcgaacgtccctctcatcttcgtgaatcctgtccaggcatttgttgaccccttcatctgatacccctgacctcacattgccaaaagtctacccctacccagtacactggaattagacaaaatcccaggagttttacctcaactctgagtgtgcccacaggagctctccctgaagccacgtccttttaagcagggtctagggttcctcccttgtcttaatgaactctttgtcacacggaggacgttatggagcccttatgatctttcactgcctttctgcccagcgttttgtctttccatggacatttataatattttccatggacattttgttctctcaatgtccacccctaatttccaacatcccaaagattctcatgtgtttcctgaaagccatttacaggaatggctgtgcccagacccccttccccaggatcctccttcacacctggtaggtgcctctcctagagagatttgcactcagttgtcgtgcagtcacatggcccagatggttgttaatcacccccttcctggcaacagctagcagccagggaatcactggcacagaaacctcagggtgaccaagatgaggccacctctgtgctgaaggctgtgctccagagcctgcttgggatcaggcttaagcaggtcttcagccagacctgatgttacctggtttccttgagctgccctgcctgagctatcgggagcactccctcaatgcacatcttgattccctatctcatgctctgcttctagaaaccatgagctatcaattgctactggcaatggtcctgggaagtcaaccctaagtatggattctggggttggatgactccccacaggacttcagtgagcaacaatcactgctggcagttggaggacagagtcgctagggcatgtgaccactgtgaaaccaccgatgtttcacctggggtaattttggatgaactacggtagaagcactgaaggtacattgcttttggtttggaagattgtaggtaaataatagcgatatgaatgtggaattggatggctgcaaacgagtgccattgatgcattgaaagaggaaaagtcaggctgtcacctgtcactcagcaatttaaagtgtgagagttgggactagatgtggtggctcacatctataatccagagattcgggggaagcttgaagaggtaggatcttttgagtccaggagttccagaccagcctggacaccagagcaagacctcatctctacaacaaaattttcttaaaaattagatgggcttggtggcacgcacctgtacttgtagatctagctaatggggagcatgagataaaaaaatcacctgagtcagggacttaggggttacaatgaggtatgattgtgccagtgcacacactcccacctggccaacagagtgagattctgcttccaaaaaaataagaaataaatcaggtttgagagttggaaagcatcatcttctcctagagccaaaggacatgtacaactgagacccaggaacaaagcttcatcacaaagagaccatcatcagtggagccgggagatgcattccccctcaccctgccttgaggaggcagtggagtcatctgtctgggatcctttctgacccagccctatttgtttgtctctttggcttctttggatttgtatattttagctgttataacactgtaaaacaaacagagtgatttttttgagttgtgtgaatgatgctagctccatagtcaccctgagagtgatgggaacttttgaatttgtggcaagttggagggtagtgtaagtgacctgagattgccaaattggggctagcactggatgtgaggttaggctagtggaaaaatatgcccagaaccagaggagtgtgggctcactgcaggtggttaggctcagatccaaattgtacagatggatagctttggggtaaagaataacatagttgagaagtgcatgtgttagtctgttcatgcactgctataaagaattacctgagactgggtaattatttataaaactcaggtttaattgggtcatggttccacaggctgtacaaaaagtatgatgctggccatcagctcaacttctggggaggccccagaatagttagagtcatggcaaaaagtacaagggaagcaggctcatcttccacggccagagctggagcaagtggtaggagaggtgatacacactttcaaacaagtaggtcttttgagaactccatcaccggacagcacctatgggatggtgctaaattattcatgaaatatccgcctccataatccactcaactgtcaccagcgcagccagccccacctccaacagtggggattacaattccatatgaggtgtgggtggggacacagctccaacctcaatcagtgggcatcctggattgggtctactatagaaggagaaccaggagctgactatgatcttgaaccctacccatgatggccgggcggggtgactcatgcctgtaaccccagcactttgggaggctgaggtgggtggatcgcctgaagtcaggagttagagaccagcctggccaacatggtgaaaacctgtctctactaaaaatacaaaaaattagaccggcgttgtgctggatgcctgtaatcacaccactacgctccagcatgggaaaaaataccaaaacttcgtctcaaaaaaaaaaaaaaaaaaaaaaaaaaaaagactgcccatgaccactgcaccagtgagagggacaccagcatcactgagatgcaagggctggacattcttcataggtcagagctcaaagcaggggacactgatacagagatgggctccatccatagcaccaaagtggtgagaggatgtgggaatggcagaggccagcactttgccatcaatgcaagggggtataaggaggtgacaccagtgccagagtacatcacggggggactgccctacaatatctaggacttacctcttagagcgtgtttcattagcgacaacagatataaatggcagacaggtgtgtccctgcattaacaggaaatagaaatcatcaagaggaacagaaggcagatgtcagcagccccttagaaagtcatcatccttcatacagttaaaatctgagacagttctcacacgagaaggcctaactcaaaaagaggctgggttctcatgaggcaggtttatgcaaaaccaaggaaggtgtacaagtttggaattctccagtttcccttggaaaagacctacagtcatttgcttaggtaactgagcactgaacaaaggtgagtattgttgtcttttagaagctcttggccaagaaggccttgttggcataaaacccatggtttggaaacatcaccatgacccctgttagagtaatggcctaagggtgggggtcaggaaattgatgtattccttgccaacttctgcctctaagtgagtgaactctgtttgtgaacctctctcctctgtggttatgttcctaggctctcatgtataatcaggagtcatagacttagaaacaggaaaaatacttacagtgtttttgtggcctgtgagctatgacttataattttaggaaaaaaacaattgcaaatggaaagcctaagtctatcaatgctcatccaagacaacataatcaataaaaaccaatatcaaatctcaaggcaaattatttcctgtatatagatggcagagatgagcaccaccatcaaaaactcaaggaccagtgctgtgggtccagtcatctgtttcatggaattcaccagtctggtatcttcaaaatccagaaggatgatggcagatggcaggaaagtaatgcaaacgtcatcaggtgtgaccccactgtagcagctgtgatggatgttttctctcaccatagcaataaataacacaacctcggtcacactgtatgcattgttggtctgcaaaatccatgttttgcaaaactcttcaggaaggtggatctgtaatattggcattgacatgagaacaacagcagtatttattcacaatctcaagctctctgtcttcccgtctctctcattagccatccaagtagtcctgaggaaccaagcccatcagaacattctgcaacataatacacagctccattctccattcaaattttgttgttgttgttgttgttgatgagacaacatcttactccatcagccaggctgacgtacagtggggctatctgggctgactgtagtcttgagcttccaggctcaaggcatcctctcacctcagcctcctaagtggcttgaactacagacacacagcgacatgctgggctagtttttgtatattttgtagagacgtgctctcaccatgttattcaggctggactcaaactcctgagcgtaagtgatccaagcaccttggcctcaaagtgctgagattacaagcctgagccactgcacccagcccaatctccattctactgataacaatgtcattaccaggtctgatggacaggaaatggtaaggtttctgaaaacctaaggatcacacagcgagttccaaaggctgaaagtgcatacctgtcgacactgataccaatgacatccaatggtgagaatgacattccttgtagtcctagctctgctcataacaaatctatactgaagtgtaagagtttgatggtcatggggattttccatgtctctgcctttcagcgatgtgccatatctgtgaagtgttcagaaatgcaacagcctgaggcatgctgggcatatcctctaataaaaaggaaaatgccattttatggtcctgtatttctacaagttggaacacatgggcctgtgatccagatgggggaaatgggaatattcccactcattcaccttcatccacgaagcccatttgaaagctttgggcttcccatccttgtagattttagtgttgtgggctgggtgcagtggctttcacctgtactgccaacactttgggaggcctagacaggtgaatccactgaggccaaaagttcgagaccagcctggccaagatggtgaaaccccgtccctactaaaaatacaaaaattagcaaggtattggggccagcacctgtaatcccagctgctcgggaggctgaggctggagaatcgcttgaacccaaaaggcagagactgcagtgacccgatcctgcctttgcactccacctgggcaagcagaacaaaacttctgtcttgaaaaaaaaaacaaaaaacgaacaaaaaagatgttagagttctgggtttagaggtctataccccagaaagagaatggtttcaacaagggacaaagaagttgctttaaacgttgacttgccatttcttttcagtgtgtttgttctcttgcgtcaagagaccaccagaaaagtggtgcaattactctcctgtcaagaatcattgactatcatctgcaagagggtcagatcctggtatataattagggcagaaatacttagtctgagaagggtatgacatccagaggccctattaatgatgtccttttctccatgcctgactctgaccccatgtgctggactgcccctgtgtggatggcctcatggcctgctcggactctgaggtcccaccccaagtggcacctccatggagggctctactcttgtatgggctctgacactcacactgagacactctcccatggacacctcttcacccacttggggtctgaaactgggctactccatccctccctaacctggaacagagagctttcactgctattacacaagtcatagaggctaactcctcatttttccaagctaattattgaaacattagtcctgggttgataagacaagataagttaacttttcataaatttgcttatcaagttttgaataaattcaaataaattcaccttccccacacaccttagttgtcgacatcacacgcgcacccatactcacagggtgagcacgaaggcttcactgtcagtggagaaagtggcaaaacccttctgtgcctcatcctggtctagacctggccctcatcctttcccactcttcccctcactcccttggattcatccacactggcctcctgcctgctgctccacctccctgcgaagctcacccctgcctcagggcctttgcacgtgcagtggcttcaagccatatcctcttcacccagatctcccagatctcctgaatgatcttcttttatcattcaggtctcagcttgcatgtaatcttctcagtgaggattacccaaaccacatagttcattcattcattcaaatattcattcaatggcatattgacaaagcagctacttcatgccaggccttgggccaggtgttatggatatggcaacaaacaaaacaagagttttctgctctcaaatttttacccacttaaaggagatatcatacatcatctgtaaataaatacatcatctgtaaataatgatgtaaataaatacatcatctgtaaatctgtaaataatgatgtaaataaatacatcatctgtaaataaataaagtataataaaagaaaatagtaggtttttttggttggaggtgaccgtgaagtttgcaaataccatcttacaacacattattttattttatttcatttcatttttaattttattattattatactttaagttttagggtacatgtgcacaacgtgcagatttgttacatatgtatacatgtgtgaagttggtgtgctgcacccattaactcgtcatttagcattaggtatatctcctaatgctatccttcccccctcccccaccccacaacagtccccggtgtgtgatgttccccttcctgtgtccatgtgttctcattgttcagttcccccctatgagtgagaacatgcggtatttggttttttgtccttgtgatagtttgctgagaatgatggtttccagcttcatccatgtccctacaaaggacacgaactcatcattttttatggctgcatagtattccatggtgtatatgtgccacattttcttcatccagtctatcattgttggatatttgggttggttccaagtctttgctattgtgaagagtgccgcaataaacatacgtgtgcgtgtgtctttatagcagcatgatttataatcctttgggtatatacccagtaatgggatggctgggtcaaatggtatttctagctctagatcactgaggaatcgccacactgacttccacagtggttgaactagtttacagtcccaccaacagtgtaaaagtgttcctatttctccacatcctctccagcacctgttgtttcctgactttttaatgatcgccattctaactggtgtgagatggtatctcactgtggctttgatttgcatttctctgatggccagtgatgatgagcatttcttcatgtgttttttggctgcataaatgtcttcttttgagaaatgtctgttcatatccttcacccactttttgatggggttgtttgtttttttcttgtaaatttgtttgagttcattgtagattctggatattagccctttgtcagatgagtaggttgtgaaaattttctcccattctgcaggttacctgttcactctgatggtagtttcttttgctgtgcagaagctctttagtttaattagatcccatttgtcaattttggcttttgttgccattgcttttggtgttttagacatgaagtccttgcccgtgcctatgacctgaatggaaatgcctgggttttcttctagggtttttatggtttgaggtctaacatgtaagtctttaatccatcttgaattaatttttgtataaggtgtaaggaagggatccagtttcacctttctacatatggctagcctgttttcccagaaccatttattaaatagggaatcctttccccacttcttgtttttgtcaggtgtgtcaaagatcagatagttgtagatatgtgacattatttctgaggactctgttctgttgcattggtctatatctctgttttggtaccagtaccatgctgttttggttactgtagccttgtagtatagtttgaagtcaggtagcatgatgcctccagctttgctcttttggcttaggattgactttgcaatgcggggtcttttttggttccatgtgaactttaaagtagttttttccaattctgtgaagaaagtcattggtagcttgatggggatggcattgaatctataaattaccttgggcagtatggccattttcacgatattgattcttcctacccatgagcatggaatgttcttccatttgtttgtatcctcttttatttcattgagcagtggttttagttctccttgaagaggtccttcacatcccttgtaagttgggttcctaggtattttattccctttgaagcaattgtgaatgggagttcactcatgatttggctctctgtttgtctgttattggtgtataagaatgcttgtgatttttgtacattgattttgtatcctgagactttgctgaagttgcttatcagcttaaggagattttgggctgagacaatgggttttctagatatacaatcatgtcgtctgcaaacagggacaatttgacttcctcttttcctaattgaataccctttatttccttctcctgcctaattgccctggccagaacttccaacactatgttgaataggagtggtgagagagggcatccctgtcttgtgccagttttcaaagggaatgcttccagtttttgcccattcagtatgatattggctgtgggtttgtcatagatagctcttattattttgagatatgtcccatcaatacctaattattgagagttttcagcatgaagggttgttgaattttgtcaaaggccttttctgcatctattgagataatcatgtggtttttgtctttgggtctgtttatatgctggattacatttattgatttgcatatattgaaccagccttgcatcccagggatgaagcccacttgatcatggtggataagctttttgatgtgctgctggattcggtttgccagtattttactgaggacttttgcatcaatgttcatcaaggatattggtctaaaattctcttttttggttgtgtctctgcctggctttggtatcaggatgatgctggcctcataaaatgagttagggaggattccctctttttctattgattggaatagtttcaggaggaatggtaccagttcctccttgtacctctggtagaattgggctgtgaatccatctggtcctggactgtttttggttggtaagctattgattattgccacaatttcagatcctgttattgctctattcagagattcaacttcttcctggtttagtcttgggaaggtgtatgtgtccaggaatttatccatttcttctagattttctagtttatttgcgtagaggtgtttgtagtattctctgatggtagtttgtatttctgtgggatcagtggtgatatcacctttatcattttttattgcatctatttgattcttctctctttttttctttattagtcttgctaccggtctatcaattttgttgatccttttaaaaaaccagctcctggattcattaattttttgaagggttttttgtgtctctatttccttcagttctgctctgattttagttatttcttgccttctgctagcttttgaatgtgtttgctcttgcttttctagttcttttaattgtgatgttagggtgtcaattttggatctttcctgctttctcttgtgggcatttagtgttataaatttccctctacacactgctttgaatgtgtcccagagattgtggtatgttgtgtcttttttctcgttggtttcaaagaacatctttatttctgccttcattttgttatgtacccagtagtcattcaggagcaggttgttcagtttccatgtagttgagcggttttgagtgagtttcttaatcctgagttctagtttgattgcactgtggtctgagagacagtttgttataatttctgttcttttacatttgctgaggagagctttacttccaagtatgtggtcaattttggaataggtgtggtgtgatgctgaaaaaaatgtatattctgttgatttggggtggagagttctgtagatgtctattaggtccgcttggtgcagagctgagttcaaatcctgggtatccttgttaactttctgtctcattgatctgtctaatgttgacagtggggtgttaaagtctcccattattattgtgtgggagtctaagtctctttgtaggtcactcaggacttgctttatgaatctgggtgctcctgtattgggtgcatatatatttaggatagttagctcttcttgttgaattgatccctttaccattatgtaatggccttttttgtctcttacgatatttgttggtttaaagcctgttttatcagagactaggattgcaacacctgcctttttttgttttccattttcttggtagatcttcctccatccctttattttgagcttatgtgtgtctctgcacgtgagatgggtttcctgaatacagcacactgatgggtcttgactctttatccaatttgccagtctgtgtcttttaattggagcatttagcccatttacatttaaggttaatattgttatgtgtgaatttgatcctgtcgttatgatgttagctggttattttgctcattggttgatgcggtttcttcctagccttgatggtctttacaatttggcatgtttttgcagtggctggtactgactgttcctttccatgtttagcgcttccttcaggagctcttttagggcaggtctggtggtgacaaaatccctcagcatttgcttgtctgtaaaggattttatttctccttcacttatgaagcttagtttggctggatatgaaattctgggttgaaaattcttttctttaagaatgttgaatattggcccccactgtcttctggcttctagagtttctgccaagagatcagccgttagtctgatgggcttccctttgtgggtaacccgacctttctctctggctgcccttaacattttttccttcatttcaactttggtgaatctgacaattatgtgtcttggagttgctcttcttgaggagtatctttgtggcattctctgtatttcctgaatttgaatgttggcctgccttgctaggttgcagaagttctcctgggtaatatcctgaagagtgttttccagcttggttccattctccccatcactttcaggtacactaatcaaacgtagatttaatcttttcacatagttccatatttcttggaggctttgtttgtttctttttactctctttcctctaaacttctcttctcacttcatttcattaatttgatcttcattcacttatatactttcttccacttcatcaaatcggctactgaaggtattgcatgcatcatgtagttctcatgccatggttttcagctctatcaggtcatttaaggtcttctgtacattgttttctctacttagccattcgtctaatcttttttcaaggtttttagcttccttgtgatgggtttgaacatcccctttagctcagagatgtttgttattactgaccttctgaagcctgcttctgtcaacttgtcaaagtcattctccatccagctttgttccattgctggtgaggagctgcgatcctttggaggagaagaggtgctctggtttatagaattttcagcttttctgctctggtttctccccatctttgtggttttatctacctttggtctttgataatggtgacctagagatggggttttggtgtggatgtcctttttgttgatgttgatgctgttcctttctgtttgttagttttccttcgaacagtcaggttcctcagctgcaggtctgttggagtttgccggaggtccactccagaccctgtttgcctgggtatcaccagcggaggctgcagaatagcaaatattgcacaacagcaaatattgctgcctgatccttcctctggaagcttcgtctcaaaggggtgcctggctgtatgaggtgtcagttggcccctactgggaggtgtctcccagttaggctagatgggggttagggacccacttgagaaggcagcctgtccattcacagagctcaaacactatgctaggagagccactgctctcttcagtgctgtcagatggggatgtttaagtctgcagaaatttctgctgccttttattcagctatgccctgcccctacagatggagtctacagaggcaggcaggcctcattgagctgcggtgggctcctcccagttcgagcttccagaccactttgtttacctactgaagcctcagaaatggtgaacacccctcccccacccagtctgccgccttgcagttccatctcagactgctgtgctagcagtgagcgaggctccatgggcgtgggacccactgagccaggcacaggatataatctcctggtgtgccatttgctaagaccattggaaaagcacagtattaaggtgggagtgtcccaattttcccagtacagtctgtcacgggttccctcatctaggaaaggtaaatcccctaaccccttgtgcttcccggtgacgcaatgccccaccctgcttcagctagccctccatgggctgcatccactgtccaaccagcccaatgagatgaacaaggtacctcagttggaaatgcagaaatcacccatcttctgtgtggatcaggctgggagctgcagaccggagttgctcctattcggccatcttggaatggcaatctatgtttgctttttacatttgaaaaaactggtgtcacgtacctaggtattaatcattgtggtatcctcttgccgatttacctctttatcattaactagtgaccctccttgtcttttgttgttacagtctgtgattttagtctattttatctaatatgagaatagctactctggcacttttttggtttccagcttcatgaaatatccttttccatttccctgttttcatttccctttcggtgtctctatagatgaagttgatttctttaaggcaccataagttgggtcttatttctttatccatttgaccatttagagaatttagaacactgtcagtgttattattcataagtaaaaacttaagagtgggtgtagtggtgtacatctgtatttcctgcactttgagagactgaggcgagctgatctcctggggtcaggagtttgagaccggcctggtcaacatgatgaaaccctgtctctactaaaaatacaaaaattagccaagcatgctggcatgtgcctgtaatccaatttacttgggaggctgaggcaggagaagcttgaacctgggagacaaatgttgcagtgagctgagatcacacagagaagtcatctccactctcctcatcagaacctcttgttcacagcatttgtgagcacaaatcaatgatggttattctttcctactaattagggatattttattacacagcaatagcctccagcaaagggaaccatcatacatgattcctacaagttgacagggctggaattatcactgaaaaactaaggtggctatacttgattcccaatgtccaatttttcatgaatagagaaatttatcctttttccccccagccagaaaccaagttttgctcttacgcccaggctggaatcaagtggcacaatctcagctcactgcaacctctgccccccagcttcaagaaattcaccttttgaacaaggagatattaaggatacactatgtgtatgctaccggtggttgcaggagactcagaaaagagagaaacagtcactggcctcgtgcaactgatattctcgggaggagagaaaggcaatcaagaaagaaacatgctgtatttcagacagctgtaagtcctccacaagaaaagaaagcaggtgaggaacataggaaatgtgtcaaccataaggttcccgctaattctataagttggtcagggatatcctccaagaataagcagcatctgagcaatcacctgaagggaggaaggaaggaagactgtgagtggtggcttacacctgtaatcccagcactttgggaggccaaggagggcagattgcctgagctcaggagttcacgaccactcagagcaacctgttgatacccaatctctactaaaaacacacaaaaaaattacccgggtgtggtggcacgcacctgtagtcccagcttccatgcccagctgatttctctctctccatatatatatatatatacacatatattgtttttgcagagatagggtctcactgtgtcacccagtcatcaagcaattctcttatactgttttggaaaagcatgggaattacaggtgtgaaataccctgctggtcctgaaaaatgtgatatttgggattctctgcctggcttgttttacccaaaataatgacctccagttccttccaggttgctgcaaaagacatgattttcactgttttataactgaatagtattcctgtatgtatacataccacattttctttatttattcttctgttgattgacatgtagggtgattccatgtctttgctactgtaaataatgctgcagcaaatatttgtgtgcattttgatctattcctttgagtaggtacccagtactgcaactgcaggactgagtagttgttatattttttgttctttcagaaatctccatagtgtttgccataaaatctgcactaatttacattcccaacaacaatgcataagatttccccttttctccacattctcactaacatttgttatgtttttgtctttttcataatacccattctgactggagtaagatatctcattgtggtggttgttgatatttttgagacggggtctcactctgttgccagactggagtgcagtggtgtgatcgtggcttgctgcaacctccacctcccgggttcaagcaattctcctgcctcagcctcccgagtagctgggactacaggcgcgtgccaacaggcctggctcattttttgtatttttagtaaagacagggtttcaccatgttggccaggatgatcacagtctcttgagctcatcatacacctgcctcagcctcccaaagtgttggaattacagtcatgaggcagcgcacccaacctcaatgtggttttaatgaccatttctctgacgattcatggtgtggagaatttctttgaaataccttttggccatttatatgtgctcttttaaaaactgactcctgtccaggtgcggttgagcatgcctgtaaccccagaacttcgggaggctgaggccaatggatcacttgaggcaaagaggcagaaatcagcctggccaacaaggcaaaaccccatctttactaaaaatacaaaaaatcagccacgggctgtgactcgtgcctgtggtgcaagttactcaggaggttaaggcacaggaattgcttgaacccggtaggcacaggtcacagtgagccaagatcatggcactgcactacagcatgggtaatagagaaagacctgtctcataaaaacaaatgaataaataaataagataaaaaataaaaaagtctctttatgtcctttgccgactttttaatgggattctttggagttttctgttgtagttgagatctttgtttactctcggtattagtcttttgtcaaaggaaaagtttacaaataatttcttccgttctgcagtttgtctgctcactctgttgagaggattatttctttggctgtgcagcagctttttgtttcagtaaagcttttgaatttatataattaaaattttcagtttggtttaaatttgcactggtcgatttttggttttgttgcctgtacttttgaagtcatactcttgaactctttactagacaataaccagaagagttttctctagttttcttctcacatttttattatttcagtacatatatttaagtctataattcatcttcaattgatttttgtagaaatagtgagaaataggagtccaggtttattcttctgcaaatgacaattcaattgttccagcaccaattattgaaaagggtgtgctttcctcaacgtatattcttatcagctttgtcaaagatcagttggctataaatgtgtggctttctttctgggctctctagtctgttacatcaatctgtgtgtctatctgtatactactaccatgctgtattggtgatgatggctttgtaatataatttgaagtcaagaaatgtgatgctcccagctttgtttatttgcttcagaaaggctgagtcaacagctgcagagatgaagctgcccctcctcgcagggctccttcccggaaaaagatcatggctcccactgaccatataaccatggctggaactcctgaaattcccaaagggaggccctacccagtgaggggggatgaatgaaggtcctacttaaggaatctgtctggccacaatcaggcacagcagctgtgctgccttgtgggggaccagaccacctggattccctggagcctgcaggctagaatgtctgagtccatggaaacacagaaatggaggccgccctcacctccccagaaaactgtagtctcaggcagtctccagccgattgccactggttggctgctattccaagccagtgggtcttaacttgagaggtgctgtggaagtggggcccacggaatgaggctgcttggctccctggattcagccccttttctaagggaatgtacagatggaactcccgccttgcccagctttccaagtatataaaactcctgagtctctgtgagtgtctgagcgagtgctctggcaacattcgacacggctctgtgtatctgacccaagacccttatggcatgagctaatgggaggatcttctgatccatgcgtggcaaagatgcatgggagaaacatggtttgtgggtaggggttgtgcattcactactgcttctcttggctgtaggtgaaggtttctttggctctgtgctgatactgggtgcaccatcacccaccccctttgtttcttctcctgggtcaagtcatttgcctaatcagtcccaatgtaggaacctggatacttcagttcaaggtgctgaattcaccgtgcttttcattcaggggaagacagctgcttctcattgggcatcttggcctgcccacttcacgtcactttttgtaaaatccacaccactccaggaatatccattacttaacttcgcctgaaataaacagaaggctcattacacttatcatgggctcacttacttcgcctataatgaaggtgccatggaaatgctagtggatgacgtggtccattttcttagggatgagatagaaaaatggtgtatggctttttaatttaattaaaatttttagtttggtttaaatttacattggtctctttttggttttgttgcctgtacttttgaagtcttactcgtgaactctttactggacaatgaccagaagagttttccctaagtttcttctgatattttgaccatttcagtacatacatttcagtctataattcactttaaattgatttttgtaaacatggtaagaaataggagttcagatttattcttccgcatatgataatgcaactgtcccagtaccaattattgaaaagggtgtgctttccctagtgtatattcttgtcagctttgtcaaagatcagttgcctatgaatgtgtggctttcattttggattctctcgtctgttacatcaatctgtgtgtccacatttatacctgtaccatgctgtattggtgactatggctgtgtaatatattttagagttaggaaatgtgatgctcccagctttgttcatttgcttcagctgaaaaggttgagtccacaattacaaagatggcagccgcccatccccggaggacctccaacccagaaagagatcaggcttcccaccaaccctataaccctggctggagttcctgaaattccaacagggaggaccttcccagtgaggagggatgaatcaaggtcaaatttaaagaaacagtctggccactatcaggcacagcagcagtgctgccttgtgggggacccctcctgctccagaccagctgccctccctggagcccgaaggctagattgtctgagtctacggaaacagagacggtggccgccccaaccacccagaactcggtagtctcaggcacttggcttgctatcttgccactgcttggctggtattccaagcccgtgggacttgagaagtgctgtgatgatggggaccacaggatgaggctgtctggctccctgtgatatggctgtgatgagtggaggaacaccagggctcatgtctcacacagaattggagaaaatgacacaaacacatgtacagtggttttatggcgtgcagtttaataggcaagaacgaaggaagagctccccatactgagacagagggaggggggctccaaagccaaaagaggaaacccggagtgctgtggataccaatgagttatatgaagaaactggagggggcggtgtctgatttgcatagggttcaggcgattggttcgaccaggcatgtcatttatgtggcccacggaaaaactggccctcccacctagcctttgaatatgcacgtgccggacaccctgatttcctacactcatggggatatatgggggtggccatatcgccaggcacaggtggggacaagggccagaagagggcgggaatcgctatgtttgggtggacccagtttctaatggccggcatctgcagatcaaggttaccggagaactctaaaagccggggctttcctgctagacaagactcatttctggagctgctttaaaaagaaacaaaacttcccaaggaccccttttcctccctgtctgcccaaaataatttcttaacaactcgtataacacctgaattcagcccccttactgggggaatgtaccaacggaactcccacctttcctggtttctcaaggctagattgtgtaaacctcctgggtctcggtctgtgtctgagcagctgctctgccaacactccacacagccctgtgtactaggcccaaggccgccgtgactcagcccatgggaggatctcctgatttcttggttgcaaagatccatgggagaaaaatggtttctggggcggggtcacacactcatggcttctcttggctgtgcaagaaggttcctttggctctgttccaatatagcgtggttcatcacccacccctgttttctttgttctcctgagtcaagttgtttgcctagtcagtcccaatgtgagaacctgaatatttcagttcacgtgcttatcgtgaaattcactgagactttaattcagtggaaggcagcctcttctaattggccatcttggcccgccccctccacgtcacctcccataaaatggccacgctctccagggacgatgccattatatatctttacgtgaaaccgacagaacacttattacactttttgtgagctcatttacttcacttataatgaacatggccatggaaatgctagtggagaaagtggtcgattttctgatggatgtgataaaaaaatggtttgccgaccaattaatgacatatgtctcaaaactagtaacgagacccttaatcgctgggttgaagtttctaatcaagaagatgctcatctatgtattcaacaaagcagcttcccttgcttctgaaatgcttccaaacaacatctcatatttcctgaagaagataatgcctggacaagcagcacaagtcattcaggtttactttcagctcataaatccagcaggatattcgcacaattgttgggaaaccttatcagttcatgagtcgtgcatgtttcctttaatttcaggaggaagagggtaatctggaagagtttcctgacctactctgctgctgtgattaaacaaccaccaggaaattttgatgacactgttctcctgagctcctccctttcctcggggaagaaaagcattgaaactacaaaaataaagtgttatttggctggagtgaggtctcatgtctgcttatgcggtggctcgctgctcagaacagggtgagtctctgagttgtacgctgaggaggggaggctgtcaatctagaaaaaacccattgcatgggacacctccatggggtctggggggctgaggatgaggagctggactggatctagggaaggaggaggtttcagagggtgaaattctggcagtaaatcctgggggtgtttgaaaacttcctccctcagaaggagaagactcagggaggaataaggacaaaccatgggtcccttgaggggcatttactaacttaagaggactttatcgggaagcagagtgacaatggcctccttgaggactgaggcccctggataaatgaggcccagatccagatccagtccatgggagatgagaccttcaagggacatatttttgttgggacagaggaaaagtgcagctctgcagctgcagaggaagccttggcagtgtgaaagcgaccttggagggggccctgtgcgttctgaatgcttctgaggtccatcccctgtccccgcctctttttctggattttttgggctccatggtctccgccatcttctgagcgctccacgctgccaccttcagttttctcttctgggctccaaatactccaaaatctttcatatctgtgcccctacccctgtttttagcatgtgttgggactccaggtccctgaaggtttctggcctgaaatccacctccccagcggtgtggattctgctctagagaccccgcacttggcaaggttcccaggcccctgggggacaaccgagtggtatgtgcacttcagggctccacactcggcaaggtctttcaagcccttggggttccctcctcagttttcttcacatgtctgggatgtagtcactctataaatgccgggatgtgatccccaccccagtgattttttttagttccatgagtgttgctatctgaatagtcatcctgagagtgatgggaccttttgaatttgcagcaagttttagattagtgtgagtggcctgagatcgcaaaactggggctagcattggatgtgaggttaggctggtggaaaaatttgcccagaacctgaggagtgtgggctcactgcaggtggttaggatcagcacagaattgcaaggatgtatagctttggggtaaagaataacatggttcagaagtacatgtattagtcttttcatgcattgctataaagaattacctgagactgggtaattaattataaaaactcaggtttaattggctcatggttccacaggctgtacaaaaaggatgatgctggccatcagctcaacttctggggaggcgtcagaaaacttagagtcatggcaaaaagcacaagggaatcaggctcatcctccatggccagagctggagctagtggtaggagaggtgctgcacacttttgaacaatcagatctttttagaactctatcaccagacagcacctagaggatggtgctaaattattcatgaaatatccacccatatgatccactcaattctcaccggcccaaccaggaccacctccaccattggggattacaattacacatgagatgtgggtggggacacagatccaaactcgatcagtgggcatcttggactgggtctactatagaagaagaaccaggagctgactatcatccttaagactgcccatgatggccaggcagggtggctcatgcctgtaatcccagcactttgggaagccaaggtgggtgaatcccctgaggtcaggagtttgagaccagcctcgccaacatggtgaaaccctgcctctactaaaaacacaaaaaattagatgggtgttgtgccagacgcctgtaatcacagctactccagaggctgaggcatgagaattgcttgaacctgggaggcggaggtggcggtgagccccaatcgcactgctacactccagcatgggcaacaataccaaaacatcgtctcaaaaaaaaaaaaaaaaaaaaaaaaggctgcccatgaccactgccccagtgagagggacaccagcatggctaagatcaagtgctggacattcttcatgggtcagacattaaagcaggccacactgttacagagatgggctccattcatagcaacaaagtggtgagaagatgtgggaatggcagaggccagcactttgccatcaatgcaaggtgggcataaggagctggcaccagtgccagagtgcatcaggggaggactgctttgcaatatctagcacttacctcttagagtatgtttcattagggacaacagatataaatggcagacaagtgagtcccttcagtaacaggaaatagaaatcatcaagaggaacagaaacagatgtcagcagccctcatataaagtcatcatccttcatccagttaaaacctgagacagttctcacataagaaggtctaattcaaaaagagactgggttctcatgaggcaggttcatgcaaaaccaagggaagtatacaactttgggattctccagcttcccttggaaaagacctacaatcatttgcttaggtaactgagcactgaacaaaggtgagtattgttatctttcagaagctgttggccatgaaggtcttgctggcataaaacccatggttggaaacatcaccatgacccctgttagagtaatggcctaagggcaagggtcaggaaattgatgtattccttgccaacttctgcgagacgagtgttggtccactcatctctttcacggaattcaccagtctggtatcttcaaaatccagaaggatgatggcagatggcaggaaactaatgcaaacaccatcagttgtacctccactgtagcagcagtaatggatgttatctcttcattgtaatatccagggagggagaagatgacattattctcaatattctaaacaccctgtgtgtacagcctctgtgatattttttgtaatatccgtgtgggagagaattatattactcctaatatctcaggggttgtgccccctctgtgacaatgttcctaacacccaggaggggataggatgatatcacttttagcatcacagggggtgtacaccccactgtaatattgttcataatatccgggggggagagaatgatattactcccaatatcgcaaagactgtacaccaacctgtgatattatttgtaatatccataagaggaagaataatattactcccaatgtcacaggaagtgtacacccttctgtgatattgttcaaaagatccagttagggaggggatgatattactctcaatatcttaaacaccctgtaggtaagccctctgtgatattcctcataatatccagagggagaggatgatattactcccaatattgcatgaagtctacaccccacctgtgatattgttcctaatatccaggatgggagaggatgatattactcccaatgtcgcaggggatgtacaccttccctgtaatattgttcgtaatatctagaaaaggagaggataatattactttcaacatcgcagggggtgtacaccttccttgttatattgttgctaatatccagggaaaaagaagatgacattaccaccactattgcagaaggtgtacacccccccttgatatagttcctaatatccagaaaaggagaggagatattactccaaatattgcaagaggtgtacattcccctgtaatatttttcctaacattcaggaagaaagagagtgatattgcccttaatattgaagggagtgtgccccccccgtgatattgtttctaatatccaagaaatgaaaggatgatattactcccaatatcacaggggctgtacagccccctcccatgatattgttcccaacatcggggggggggtgaaatagtattattcccagtatcacaataggtgtacacacctgtcgtgatattgttcctaatacccatgggggaaaggacgatattattcttaatatctcagagggatgtacaccctccctgtgatattgttcctaatatccggggtgggagaggatgatattacccccaaaatctcaaagggtgtacacccctcttgtgatattgttcctaatatccagggtggagaggataatattattcccaatatccaggaaaggaaacgatgatgttactgtgaatattccagggggtgtcctcccctctgtgatattgttcctaatatccaggttggggagattatgatatttctccaaatatcacaaggggtgtacaccaaccctgtgttattgttcctaatatcgatggggggagaggacgatattactcccaatatcacagggggtgtacaccacctttatgatattgttcctaatatccatgaagaaagaggatgatattactttcaatatcgcaggggatgtacactccccctgtgatattgttagtaatacctaggagaagaaagtgtgatattactcccaatatcgcaggggatgtacacgcttcctgtgatattgttcctaatatttagggggaaaggggatgatattactcccaatatcgaatggtgtgtacacccccccgtgattctttttttttttttttttttttttttgagatggagtcttgctctgccgcccagactggcgtgcaatggcgcaatctcggctcactgcaacatttgcctcccaggttcgcacgattctcctgcctcagccttcggagtagctgggattataggcagctgtcaccataccaggctaatttttgtatttttagtagagttggggtttcaccatgttggtcaggctggtcttgaattcctgacctcaaataatccacccaccttggcctcccaaagtcctgggattacaggcataactttccctgtgatattcttcctaatattcaggaagaaagaggatgatattgctcccaatatcgcagagagtgtgcactcctcctgtgatatggttcttaatattcagaggaggagaggatgatattactttctatattgcagaaggtgtacacctccctcgtgatgtctttcctaatatccagtgggggagaggttattagtctcaaaatcacagaaggtgtaaacccccatttgatattgttcctaatattcaggggtggggagagaaaggtattactcctagtatttcagggcatgaacacccccaccgtgatatcattcctaatatccagaaggggaggcaatgatatttctcctaatatcacaaagggtgtacaccccttctgtgatattgtaaatattctgtgtgtacacccccctgtgttatagtctgtaatatccgggtgggggagagggtgatatttctccccatattgtaggggatgtacacccttctgtgatatggttcgttatatccagggaagaaaaaggtaatattgctgcccatattgtggagagtgtacacccccatgtaatatggttcgtaatatccaggagtggagagggtgatactgctccttacatcgaggaaggtgtacaccttattgttatatgattcgcaatatccaggggaggagagagtgatattgctccccatgtcgcagggggtgtaaaccctccgtgatatgattggtaatatccaggaaaggaaagggtgatatttctccccatatcgcgggggacgtacatcctcctgtgatatggttcgtaatatccaggaggaaagaggaaaatattgctcttcataacccgaggggtgtacaacccctgtgatatggttcgtaatacccagaagtgtacacccctctgtgatatggtttgtaatatccagggggttagagggtgatattgctccccatatcgcagtgggggtacacccccctggattggttcataatattcatggggggagaaatttacatttatcctcatatcagggggggtgtacaccccccgtgatatggttcgtaatatccaggggaagaaagggtgatattgctccttatatcgcggaaggatcaccctcccctgtgatatggttcataatacccagacgggaagagggtgatattgttcttcataaagcgaagggtgtacagccccctgtgatatggttcataatatgcaaaaggggagagggtgatattgctccccatatcacggagggtgtactcccttctttgatatggttcgtaatatccaggggtgtagatggtgatatagctcgccctattggggagggtgttcacccctctgtgatattgttcgtaatgtccagggaaagagaggatgatattactcccaatatcgcagaaggtttacaccactctgtgatattgttcataatatccagggaaggagaagacgatattactcccaatatggcagggggtgtagaactcctgtgatattgtttgtaatatccaggcaaggagaggatattactctcaatatcgcagaaggtttacacccctatgtgatactgttcatgatatccagggaaaaagaggatattactccctatatcacaaagggtgtacacccctttgtgatattttttgtaatatccaggggagagaggataatattactctcaatatcagaaggggtgaaaaccctcctgtgtcattgttcataatatttagggaaggagagagtgatattactccaaatatcacagtgggtgtacacccccctatgatattgttcctaatttccagaaggggagatatgatattattgccaatatcgcagaaggtgtacaccttactctgacattgtttgtaatatccagatggggaaatgatgatattactcctaatatcacagggggtgtacacccccttgttttattgtttgtaatattcaggggaagagacgattatattactcccaatatcgcagggtgtgtacaacactctatgatattgttcataatatccaggggaggagaggaagtgtacacccccccgtgatattgttcgtaatatccagaggtagagaggatgatattactcccaatattgcaggtggtgtacacctttctgtgatattgtcatgatattaagaaggggagaggatgatattactaacaatatcacaaaaactgtacactccctgtgatattgttcataatatccagaagaagggaggatgatattattctgaatctcgcagaagatatacaccaccctgtgatatggttcataatatcctaggggaaagaggatgacataactgtcaatatcgcagggggtgtacaattccctgtgatattgttcacaatattcagagggaaaaaggataatattactttcaatatcgcaggcggtgtacacattactgtgttattgtttataatatccggaatgagagaaaattttctcccaatatcacaggaggtgtacactcccctgtgatattgttcgtaatatccagggaggggagaggatactattactcccaacatctcagggagtgtaggccccccctttgatattgttcctaatattcggaagtggagaagatgatattacttccaaaatcgcagggggtgtacactccctctgtaatattgtttctaatattcatgagtggaaagaaagatattactcccagtattgcaggggacatacaccacactgtgatcttgttcacaatattcgggggggagaggatgatattactcccaatatcaaagtaggtgtacacccccttctgatattgatcgtaatatccagaattaaagatgataacgttactcccaatattgcagggggtgtacatttttgaatactgttcataatattaagagggggaggggatgatatctgtcccaatatcgcaaagtgtgtacacctcctgtgacattgtcccaaatatccagaggaaaaaaggatgttattactcttaatatctcagagagtgtacacctccctgtgatattgtttgtaacatccagaagaaagaggctgatattactcttaatatcgcagggggtgtacacccccgccccgggatattattcgtaatatccagggggaagtggaatgttcagaatgggagaggatgatattacttgcaatatcatagtgggtgtacaccccactgtgatattgtttgtaatatccgggaaaggagaaaatgacattcctccccatatggcaggggctgtacaccacctatcatattgttcaaaatatccagaaggggagaggatatgtctccaagtatcacagggggtgtacaccccgctgtaatattcttcctaatatccagggtgtgagaggataatagtactcccaatatcccagggcatgtacaccccccttgtgatgttgttcctaaaattcatggggagaaagaatattactcccaatatcacagggggtgtacatacactctgtaatattgttgccaatatgcagcaggagagaggatgatattactcccaatatcacaggggctgtacaccccgctgggatattgtttctaatatcaagggggaaaaaggatgatattactcccaatgtcgcagggtgtgtacttcctctttgtgacattgttcctaatatccaggagagaagagggtgacattccttccaaaactgaaaggggtgtacacaccctttgagatattgtctttaatatccagaacgaaacaggatgatataactcctaatactgcaggggggtacaccctctctgtgatactgtttctaatatccaggaggggaaagaaaaatattaatcccaatatcacagggggtgtacattccccctttaatattgttcctaatatccaggaagacacaggatgatactatttccagcagcacagggcatgtacacccctttgtgatattgttcctaatatccaggaaaagagaggatgatattactgtcaatattgcagggcgtatacactggttctgtgatattgtttctaatatccgggggtggagaaaatgatattactcccaatattccagcgggtgtacacccgttctatgatattgttcctaatatctgggggagagagaatgatattattgtcaatatcacaggggatgtacagattccctgtgatattgtttctaatattcacagggggagaagggtataatactcccgatatcgcagggggtgtacactccccctgtgaagttgttcctaatatccagggattgagagaatgatattactcccaatatcacaggcggtgtaaaccccctgtgtgatattgttcctaacatccagaggaaaagatgatgatattattttcaatatcacagggggtgtacgcatccctgtgatattgtttctaatatccaggggaggagaggatgatattattgttaatatcgcagggggtgtaccccaccctgtgatactgttcctaatatccggggtggaagaggataatattgctcccaatatcgcaaagggtgtacaaccttcctgagatattggtcctaatatccagggagggagaggatgatattactttcaatatcacagggagtttacacaacccctgcgatattgttcctaatatccagcggaagaagagttaggataatactattttcaaaattgctgggtctgtaccccctccccgtgatattgtttctaatatccaggaggggagaaagtaatatgactcccaatatcttagaagatgtacaccctccccataatattatttcttacatccagggggtagaggatgattttgctttcaatatcacagagggagtaaacctttccggtgatattgtttttaatatttaaaaagagagaagataaaattactcccaatacaaaggggatgtattgtgtactcccccctctgatattcttttttaatatccagatggagagaggatgatattactttcaatattgcatgggatgtataaatcccctgtgttattgttctgaatatacaggtggggagagtatgatattactccaaatatcgcagggggttctttccccctgtgatattgttcctaacattcagggagggagaggatgatattactcttaatattgcagggggtgtacccacgcctatgatattgttcctaatatccagagggggagaggatgatctaactcagaatatgacaaggggtgtacacacagcctgtgatatggttcctaatatacaggggagaaggggataatatttctcccaatatcgcagggggtgtacaaccccctgtgatactgttcctaatatacagaaggggacagcatgatattgttcctaatatcgcaggaggtgtacaacgccctgtgatattgttcctaatatccagggcgggagaggatgatattaccctcaatatcgcagggggtgtgcactttccctgttatattgttcctatgatccgggtggggggaaatgacattagtcccaatatcgcaggatgtgtgcaccgctcccccgtgatattgttcctaatatcaagggggagagaggaggatattactcccaatatcgcaagggatgtacatcctccatgcgatattgttcgtaatattcaggaggagagaggatgatattactcttaatatcgcagaaagtggacacccaccctgtgatgttcttcataatatccagggaagcagacgattatatgactttcaatatcgctgggagtgtacatcccttttgggatattgtttctaatatccaggaagggagaggattatattactctcagtattgcaggcagtgtacaccttttttgtgatattgttcctaatattcagaaagggaaaggatgatattactcccaatattgcaggtggtgtatatccccctctgatattgttccttatatcaaggaagagaaagaataatattactcccaatatcaaagacagtgtagacccctcctgtgatattgtatttaatatccatggggaaagaggatgatgttactcccaatatcgcagggggtttacacccacactgtgatattattcctaaaatccagtggaggagaaaataatattgctcccaatattgcagggtgtatacaggccctcccccgttatattgctcctaatatccagcggtggagaggatattactttcaatttgtgtagggagtgtatacccccctgtgatatttttctaatatcaaggatgggaaaggatgacattactcccaatatcgcaggaggtgtacacgccctgtgatattgttcctaatatctagggaaggagaggatgatattactttcaatattgcaggagctgtacaccctctgtggtattgttcttaatatttaggttgggagaaaatgatatgagtccaaatatcgcagaaggcatacacacttccaataacattgttcttaatatccgggggagagggtgatattactcccaaaatctctggggggtgtacacccccttctgatatttttcctaatatccagggaaggaaacgatgatattactataaatattccaaggagtgtacaccttcctaatatcctaatattgttcctaatatccaggggtgggagaggattatattactcccgatatcgcagtgggtgtacacccctcctgtgatattgtttctaatatccaagctaggagaaaatgatatcactctcaataccacagggggtgtacaccttccgcatcatattgttcctaatattcagagggaaagaagatgaagttactttcaatatcggaggggttgtacacaacccctgtgatattgctgctagtatccaggaagaaaggggattatgttactccccttatagcagggggtatacacctcccctgtaatattgttcctaatatcaaggctgggatatacgtggggggaaggatgatattactcccaatatcgcaggggttatacaaccttctgtgatattgctcctagtaaccagggcagaagaagatgatattactcctaatatcgcaggaggtgtacactcccccattatgttgttcccaatatgcagaaaaggagaggatgacattattgccagtatcgcagggtgtgtacaccacccctgtaatattgttccaaatatttagggggagagaggatgatattactcccaacatcgcagggggtgtacacacatcccctgtaatatagttcttaaaatctaggggaaaaggggatcttatttctctaaatattgcagagggtgtacactccccggtgatattgttcctaatagccgggagggagataattaaattactttcaatatctcagagagtgtacatcgcccttgcgatattgttcctaatatccagagcaaaagagaatgatattactcccaatatcttaggagtgtacatttaacctgtaatattgttcctaatatccagggggaagagaatagtattactgccaatatcgtaggggttgtacaccttttctgtgatattgttgcaaatatttagtagagggaaagaatattactcgcaatatcacagggaatgtatacttcccctgtgatattgttctgatatccagaaaaagagagggtaatattactcccaatattgcagggggtgtacaccccccttgtgatattgatcctaatataaaggaaggaagaggatattactcctcatatagaaggggttgtccaccccccttgtgatattattcctaatattcagggaagcagaggatgatattattttcaatatcacagagggtgtgcagtccacctgtgatattgttcttaatattcggggggagaggatgttattatgcctgatatcgcagtagaggtacacccctcaagtgatactgttcctaataaccaggggtgaagaggatgatattactcccaatatcgcaggtggtgtacacccccccatgatggtttctaatatacagagggggagaggaaaatattactcccaaaatcgctggaggtctacaccccccttgtgatattgttcctaatatccaggaaaggaaacgatgatattactgtgaatattccagggggtgtacacccgctttgtaatattgttcctcatatccagggtgtggagaggattatattactcccagtatcgcagggggtgcacgacgcccctgtgatattgtttttcatatccaggaggggagattattatcaatatggcaaggggtgaacaccccctgtgatattgtacttaatagttaggttggcagaaaatgatattagtctcgatatcgcagggggtgtgcactccgcctggtgatattgcttttaatatcaagggggagaaaatggcattactcccaatatcgcagggggtgtacaccgctcatgtgatattgttcctaatatccaggtggagagaacataatattactcccaatatcgcacaaggtgtacacccctcctgtgatatggttcctaatatccatgggaggagatgatgatattactcccaatatcacaggggatgtacaccacccttgtgatattgttcctaatatccagggaagaaaacgatgatattattgtgaatattacagggagtgtacacactccctgtgatattgtttttgatatacagggtgggagaggatgatattactcccaatatcacataaggtgtacaccccccgtgatattgttctaaatatttcggtggggagaaaatgatattagtctccatatcacagggggtgtgtgctcctcaggtgatattgtttttaatatcaagagggggaggagattatattactttcattatcacagggggtgtacacccctcctgtgatattgttccttatatccaggcgaggggaaaataatattactctcaatatcgcaggaggtgtacacaccccatgtgatattgttcctaatattaagggggaaagaagataatattactttcaatatcacagggtttgtactcctttcttgtgatatagtttttagtatccagggggaaagagcatgatattactcccattgtagcaaggggtgtacacacctcctgtgatattgttcctaatatccagaagtggtgaggatgatattactcccaatatcgcagggggtatacaccccacctatgatattatttctaatatccatgggaaaagagtatgatattacacccaatgtcgcagagggtgtgtatttttcctgtgatattgtttctaatattcaggcggggagaagatgatattactctcaatatagcagaaattgtacatccccgctgtgatattcttcataataatcagggaaaaagaggatgatattactaccaatattgcaggggggttacacttcccctatggtagtgttcctaatatccaggaagaaagaggatgatattaatcccattatccaggaagtgtacacccaccctgtcatgttgttcctaatatccagcagggaagaggatgatattacaccccccccccgtgatattctccttaatatccaggaggggagaggctgatattactggatatatagcaggggtgttcataccttctgtgatattgttcctaatatccagaaaaggagaggatgatattacttccaatatcgcagaaggtgtacacctccctgtgatattgatcctgacattcagaaggggagaggatgatattactcaaaataccgcagggcatgtgcattcccttgtgatattgttcctaatacccagaagggaacaggataatattactttcaatatcgcagggagtgcacacccccctttggtatggttcttaatatccagaaggaaagagggtgctattactttccatattgcaaggggtgtacaccccactgtggtatggttcataatatccaggcagggagagggtgctattactccccacagtgcggggcatgtacaccctgctgcggtacggttcctaatatccagggggagagaggatgctatgactccctatatcgcggggtgtgtacacccctgtgtggtatgttttgtattctccaggaacggagagggtgttgttacccctcatatcgctggaaatgtacactcccctgtggtatggttcgtaatatccaggggattgagggtactgttacccccatactccccatatcgtggggggagtgcacctccctgtggtatggttcgaaatatccagggtaagagagggtgctattattccccattttgcaggaggcgtacacccccctatggtatggttcgtaatatccggggtgaggggatgctatcaaaagaagagagaaagagaccccccatattgttctatattattttatactcagtacctgttttaagaagaaacaaggaagtgaaaccaaaagcaggcagcccggcgccaggcaccagacccaaaaccagacccgaaaccaggcctgggcctgcctgaccttagcctgatagttaaaattcaacccatgacctagcaaccaatgttatccatagattccagacattgtatggaaggacattgtgaaatttcttgttctgtgctgtttcactctgattaccggtgcctgcagcccctgtcacatacccactagattgctcaatcaatcatggccctttcatgtaagatctttagtgttgtgagcccttaaaaaggacagaaattgtgcactcaacaagctcggattttgagacgctagtctttcgatgcttccagctgattaaaagccacttccttcactacctcggtgtctgtggggttttgtccgcgactcctcctgctacactatgactccccatatcaaggggggtgtacacccccctgtggttcgtaatatccagcaggggaaaaggtgctattactccccatattgcagggagtgtacacccccttgtagtatggatcgtaaaatcaaggggggagggaaggtgtaattatccccatatctcagggggtgtacacccctttgtggtaaagtttgtaatatccagggatattacagggatattatccccaaattaatacttttataatttcttatgcctgcctttactgcaatctctgaacataaattgtgaagatttcatggacatttatcacttccccaatcaatacttttataatttcctatgcctgtctttactttaatctcttaatctcatcatctttgtgagctgaggatgtatgtcgcctcaggaccctgtgatgattgcattaactccacaaattgtttataaaacatgtgtatttgaacaatatgaaatctgggcaccctgaaaaagaacaggataagagcgatgttcagcgaacaagggagataagcataaggtctgactgcctgtggggctgggcagaacagagtcacatttttcttattgcagaaaatgagtaggagaaatatcactgggaagggaacgcattcctaggggaggcctatggacggccgctctgggggtgtatcccttatgtggttgaagataagggatgaaatacaccctggtcccctgcagtgccctcaggcttgctaggattagaaattccagcctggcgaattctagtcagaccagttctctgctcttgaaccccgtttcctgttaagatgtttatcaatgacaatgcgtgcacagcaggacatggaacctcaatagtaattccattttctccctggccttgtgaccttgctaggcccttctgcccttgtgatcttttattgccatttgaagcatgtgatctctgtgacccactccctattcgtatccccctccccttttgaagtccctaataaaaacttgctggttttgcagatcaggtggtcatcacagaacctgccgatatgtgatgtcaccccggaggctcagctgtaaaatttctctttcgtactctttcactttatttctcagaccaggtgacacttaaggaaaatagaaaagaacctactttgaaatattgggggctagttcccccaatagacattgttcctaatatccagaaaaaaagaagatgatattactcccaatatcacaggggttgtgaaccccacctgtgatatggttcctaatatccaggaagggagagaatgatattactctccatattgcagggggtgtgcacatccctgtgatattgttcctaatatccaggggaggagagggtgatattactcccaatattgcaagggttgtaaactccaccctgtaatattgctcctaatatttaggatttagggggggagaggataatattactcccaatatcgcaggggatgtatatgccctctttgatattgttcctaatatccagggggggagaggataatattactttccatatcacaaagagtgttcacccccctgtgatattgttcctaatatccaaaaaggaagaggatgatatcaatcccaatatcacaggaagtgtacaccccccccttttatattgtttctaatatccaggggaaatgagggtgatatttctctcaatatagcagaatgggtacactccccctgggatattattcctaatatccaggggaaaaaaagaggttgatattcttcccagtatagcagggaatgaatacaccctttgtgatattgcttctaatatcaaggggaaaagaggatgatatgactcccaatatcacaggggatgtaaacctgtggcgttgttgctaatatcaaggagggaagagtatgatattactcctaatgtcgccgaaggtgcacactttccctgtgatattgttcctaatatccaaaagggaagagaatgatattacccccagtattgcagggtgtacaccacccctgtgatattgctcctaatacccaggaaaaaagagaatgctattacccccaatatctaaggggacgtataccttccctgtgatattgtttctaatatccaagtggggagaggatggttttactctcaatattgcagggagtgtacactccccctgtgatactgtttctaatactcgggctgggagaaatagtattactcccaatatcgcagtgatattgtttccctgtgatattgtttctaatatctagtgggggagataattatattactaccccatacacaggggagggtgtacattcccctgtgatattgtttgtaatatccagggaaggagaggatgttactcccaatatcacaggggttgtacaccccttttttgatattgttcctaatatctggggggcagagaattatattactgtcaatatcacagagtgtgtacaccccctctgttatattactctttatattcagggcggtagaggatgatattactccctatatcacagggggtgttcacccctcctgtgatattgtttataatatctaaggggaaagaggatgatatcactctcaatatcaaaggaaatgtacacctttcctgtgatattgtttttattatataggggggcagaggatgatattaagaacaataccacaggggatgtacacccacgtattgatattgtccctaatatgtatggggaaagaggacagtgtaactcccgatatcgcagagtgtgtacacccccttgtgatattgtttctgatatacacggggagaaaagataatatttcttccaaaattgcagggggtgtacaaccccctgtgatattgtttttaatatccagtgggggagagaatattactcccaatattgcagggcgtgtacacaacccctgtgatattgttcctaatatccagagtaggggaggatgacattactttcaatatcgcaaggggtgtacattcccctgtgatattgctcctaatatccatgaggggagaggatgatattattcctaatatggcaggggctgtacaccttccctgtgatattgtttctaacatccagtgggggagaaaatgatattactccctatatcacagaaggtgtacactttccctgtgatattgttcctaatatccagaaggggagaggataatattactcccaatatcgcaggaagcttacaactcccctgtgatattgtttctaatatccagggaggtagggatgatattactcccaatatcgcaggggatgtacactcccccgtgacattgtttctaataaccagggggtgagaggatgatattacgcttaataccgaagggggtgtacacacccttgtgatattgtgcctaatagccagggggaagaaaattatattaattttaatatttatggggaaaaaggatgatattactcccaatatcacaggggctgtacaccgaccttttgatattgtttttaatatccagaagagaagaggataatattgctcccaatatcagaaaaggtgtaaaccccttctgtgatattggtcctaatatccagggagggagagaataatattactaccaatatcacagaaggtgcccacccccaaggtgatattgctcctaatatccaaagataatagggtgatgttactcccaatatcacaggaggtgttcacaccccttgtgatattgtttctaacgtacagggaagggagaggatgatattattcccaatatcacaggaggtgtatactcctctgtgatattgattttaatattcggggggaaaggatgatattactccctatatcgcagagggtgtacaccctctgtaatattgatcctaatatccagggcgggataggatgatattactcccaatatcgcagaaagtctacacaacccccagtaatattgtttttactatccagggggaagaggatgacattactcccaatttcacagagtgtgtacactcaccatttgatattgtttctaatatctagggggagagaatatattactcccaatatcacaggaattgtacaccacctctgtgacattcttgtgaatatccggggaaaaagagaataatattactcccaatattgcagagcgtgtacacccctccatgatatcgatactaatatttttttaaagaggatgatattactcccattgtcacaggatgtgtacaccccccttgtgaaattgttcataatattctggggggagagcataatattactccccatatcgaaaaaggtgtccaccctccttataatatggttcctaatatccaggatattacttaatccaggatacttgtaataccctaaatatacaattgcttgaacctccacctcccaggttcaagcaattcttctgcctcagcctcccgagtagctgggactacaggggcacaccaccacacccagctaatttttttttcttgtatttttagtagagatggggttttgccatattggccaggctggtctcaaactcctgaccttgtgatctgcccacctcagcctcccaaagtgctgggattataggcgtgacccaccgtgccaagccaggaagaggatgctctatagatttccccaataagagatggctttgcagggccattccaaaatatgtcaaagaaatacatttggggataaaatactttgatttcctttagggaatgttatctattatgtgatgctataccagagtcaggttggagtcggttatcttattgcaacaaagagtctgttccgtcactgttgggatctctattttttcctcttatttcttgagacagggtctcactctgtcacccagtctggagtgcagtggtgcgatcttcattcactgaaacctctgcctcctgtgttcaggtgattctcgtgcctcagccccttaagtaactaggattacaggtgtgcgccaccacacccagctaatttttgtattttcagtagagatggtattttgccctgttggccaggctggtcttgaactcctggcctcgtgtcatctgcccacctcgacctcccaaagtgctgggactgcaaatgtgagctattgtgcccagccaggatctctgttttaatgttagtgctggtcactttgcatgaactccaaagggaagaaatataatgaggtgtgtctgaccccctgccttctcatcgtgacctgaattagtttttcaggtttgcaggggatacccttggacaagaaggggctctattcggttggttggggggattagaattttactttttgtttacaatatttctcctgaaagagttaggggctcacaaggaatttccgcgtgagcaacttatgaggaaagccatctgggaagatatgtgtccttgtgtcactgggatattctcgtttaccccaatgatacggcaatgacgcagggttgtgaaattacagctatgtgtttggggaaaaaagaaagcaggattgtgtgactacgtttccaaacttcacttgcccttagccatagtgagttgggggcctggagattctgttttctttcacaatgatatagatacaattaaatgtatagaaagcaaaaaaataaaaaggtgagtaatgaggaacctctgattcctgagtggccatgtagttacccatggcacagagccacagttactgaaggtaaagtttgctggggaatttagaaatgaatccagctcttggaggagtcagtttactggatgcctaagaaaatgcaaacaaaataagaaaaaagggtaatattcaatcccatagttattgttacctgtcatagctaaagtaaaattaaaacagagtgctggcttcaatcttgatgctacactaagcttagatttcagtgaatgtgagtctcagccactagctcagagccacctcccaaagaccaaatcatgtagggacaatagaaagtacttctgagaattgtggttaccaagaacctagtaactgttggggaggagcaaaacaaagtacagaaaccagagggtacaatctgagtgagactgctatcagcttctggaggagcctttactaaaatgaatgatgagagtaactggatgatgagagtaactaatggatgatgagagtaagcaatgtctttggttttcttttttttttttttttttttttagcagacgtctcactcttgtcgcccaggctggagtgtaatggcatgatctcgcctcactgcaacctccacctcctgggttcaagcaattctcctgtctcagcctcccgagtagctgggactacaggcactcatcaccacacctggctaatttttgtatttttagtattttctggtgagggtccaggtttccggaaacaactcagagacatatgttaagatgttatctttagttttcacagggaaccaaatatgttacgactccaatttccttggctattgttttaagttaccattaccttctcgttgatcaagttgctcatttacttctcaagcctagctagatgcctggaatttcccttgaaggaagtcaagattttcctttatctccatactggctgatggtgatcgagtaagcccctaagaggggtccctgctccatctcgagatgctgctagattctacagtgcctaataaacagctctcgcctggccgacaaagagctgcttgctctctggatagcaattccaaagtgaacagacaacatcctgtttggaagactgccactctgttagaagaagcatcaggaaaacctttcttttgagctatttataactaacagcaattgaccaagtatacttttgtgagtgaaactgacctttctccctgtaagaattctccaaaatttggaaactatttgtgagtatttttacttatggcaatataattattggcacaagctcaatcagattcggttttctttcgtaacaggaaccattggagatactcattactctttgaaggcttacagtggaatgaattcaaatacgacttatttgaggaattgaagttgactttatggagctgataagaatcttcttggagaaaaaaagactgggtatattttcaatatgctttccttttaaggtccctcacctgtggaaagtaaagaatgtcactttctgacaggctcaggaacctcaagttatgtagggatctcaagaagatgggggaattcacccagttcatacaggtgaaattgctgttgcaaagattatgaatatgagagaagtccagcatggctgacttcatctcgtgtctggcctcaggctggctgcccttgctcactcttgggcataggccaagctagccatgggaggaatttagtttatagtttaactttgaagcacggatgataatagtctctccctaaaatgaaccccttccttgctcagggactgaaactacctttgtatgacaaatgaaagcccacaagattaagattatgagaggggcctgaattctgctaaaatgcaggtgtagctgactgataacaagtcattgtcccacagcttgcctttctataatctcttgcttctcaggagtcacatggccagaggtcctgagatttccagtcctgtgacccccacccagagatggacttagtgcatgaggaccattttccacacccctatgatttcatcctcaaacaatcagcagcaaccattccctagccccctgccttccaaattatccataaaaatcctagcctctgagttattagggagattgattaataatcccagtcctaccccttgggttgctctgatttaattaaaccttctctactgcaataccacggactcagtaaattggttttgtctgtgcaatgggcaagaagaacatgttgcatggttatacaggtactacaagcacagtctgatggcaaattattggttttgcttcctgcccttgatgtttctaaacatctagtccaaaattacttgtgaaaggtccagcaaagccaattttaaaagaggctatatggccaatcactattctttctacacattattgcaaataatcaggccacggctgggcacggtggctcatgcctgcaatcccagcactttgggaggctgaggcaggatcacctgaaatcaggagttcaagaccagcctaggcaacatgataaaaccctgtctctactaaaaatacaaaattagccaggcatggtggcatgcacctgtaatcccagctacttgggagactgagggaggagaatcacttgaacctgggaggcagagattgcagtgagctgagatcacaccactgcactccagcctgggcaatagagtgagactttgtctcaaataataataataataatcagaccaagtataatgaaattaaaatttattttgcaaataaattggtcctactacaatttatccttcatagaaatgtggaaactgaagataaaaaaaattaggtttcagaagaaaactatactacacctgttattagattctagccctaaacattgtttttgaggtttttattatttacctgcaatttggtctaaattctgaattatttcctgactacaagtatccaaggaataaatgggttttctttttctttatgatagttttagttggcttctaatgcaacaacaatttttattgtaatcctgtgtgcattctattcctactattcaaattattaatgttatagatctttcattgtagtacttctgaattaaccaaaatcacagtattctgaagatgattctacaaagcctgctgtttctacaaaggctgctgatgatttctacaaagcctgctgtagtgttgctgtggcctctgcttaaaaaagtagaaaacacattgatgcagcatgttcaccccaacctccctgcctaaaggctcagggaccatcttggaagaggaaggcgcgtgagattgtaagagccgaattagggggatggagtgtggagaataaggacacttcatcttggatgctcacctgccaaattgacttctgatgaaagccagctccagaaatgtgcctacagttactactttcacctaaaccctgcccttagtcaaatccttctcttcttctaagcaatcaacttcaattccttgtataacccacagtataaaagggcttttataccattctatcctattgcatgtaagccttgggtctgggaggtaacagtgtgggattccaccatctcatctccctgccacccaaacatgcctgctcttctttaagcaatattaaatgtttgtacttcagaaatttgatttgtcagcctcttcttcagactctcagcttctttggcctttgggagtaaatttgcataggcctgctcaaaacaggatgttctgggggtttgggggtgttgttttgttttgttttttgttttgtttagagacagggtctcactctgtcacccaggttggagtgcagtggtgcaatcatggcacactgcagcctcaaactcctaggctcaagcaatccccccaccttggcctcccaaagttctgggattacaagcataagccaccatgcccagccctggacttttctttaaagacatttacacagtgtaggaattactgtgggtgcactgctcaggtccccttctccaggatgctcattcctacctcatagatgattttcctgcagagatttgacctcagctgaagggcagtcacctggtccaggtggttgctattcacctccttcctgagaacagccaacagccagggacacgctagcacagagatataagagcgaccaaggtgaggccccttctgtgctgcggtgcatgctccagagcctccctgggatcagacttaagagggtctccagccagatctggtcttcgctgctttcctcgagctccccagcgcactcctgcaatgcatcttttttttttttttttttttttttgagacggagtttcactcttgttgcccaggctggaatgcaatggcgcaatctcagctcaccacaacctctgcctcgcgggttcaagtgattctccttcctcagcctcccaagtacctgggattacaggcatgcaccaccacgcccagctaattttgtatttttagtagaaacgggtttctccatgttggtcaggctggtttcgaactcctgacctcagttgatcctcctgcctcagccttccaaagtgctgggattacaggtgtgagccactgtgcctggcccaatgcacctcttgaatcacctcctcatgctttgcttttagagaacatgatccccaacatgtgattccagcaaagattctagaaagccaaccgtgacaatcacttctgggtttagatgacccccccccaccacaagatggcagtgagcacctcatcacagaggtgctgatggtctgcagcaccgcgccaggccagaacgtgccttttacagaagaaaataacccagtagctgactaggatggtgaggagggctggtgagcactgcggtagtgagagggacactagcatcactgagatgcaagtgatggtcatttttcataggtcaaagctcaaagcaggggacagttacagggcagggcttcatagcaccagtgtgatgaaagtatctgggagtggctaaggccagcactatgccatgggaagcaaggtgggcctgaggaggaggcagcagcgtcagcctgcaacaagtgggggctgccctgcagagacctaagagtcatgttatagagcacagtgtctgtaaggccaagaagtgtggacagccaagtgtgtcaattactagacatactcaagaggagcaggaagggcagggcatggtggctcatgcctgtaatcccagctacttgggagactgaggaaggagaatcgcttgaacccgggaggtgaaaattgcaatgagccgagatttcgccactgcactccagcctgtgtgatgggagcgggactccatctcaaaacaaaaaaagaaaaaggaaaaagaaaaaaagaaaaacctaggtatacttctcaagcaaataaaaataatcaaaaccaatatcatgcccgggcacaaatttcatatatataacagatttaaatatatgagggtgattatcctctcatatctccatttttttttgtttttccatttttttctttactaaaaaaagttaatgccaatgacacacaatttttttttttttttttttttttgagatggagtctcacttcttcgccctggctggagtgcaatggcgtgatctcgactcactgcaaagtctgcctcctgggttcaagcaattctcctgcctcagcctcccaagtagctgggaccacaggagtgagccaccacacccagctaatttttgtatttttaatagagacggggtttcaccatattggccaggctggtctcaaactcctgatctcaaataatctgcccgcctcggcctcccaagattctgggattataggcgttgagccactgcgccccgcctatgtatgattttttttttaattttattttcataagtttttggggaacaggtggtattttgttacatgagtaatttctttagttgtgatttgtgagattttggttcacccatcaactgagaagtatacactgaacccaatttgtggtcttttatccctcacccccttcccaccctttcccccggagtccctgaagtccattgtatcattcttatgcctttgcatcttcatagcttagctcttgaacccttactttctgtttgagggagaagacatatcatctacaagtagatactgtgtaaacattccattgcatgactatcccataacttatttattatttgtgtttggttatttgctgctatgtaacaaccccactcccaactaaatggtgtgacaattccatgattctgtggatcaaaaattctgaaaagtcaaacccaaggagttttgtctctgctccatgatgctaaagcctccgcaggggtgaggcgaatggctcagggtgactgaaaagctcagggttggaacagctggggatgaggcctctatgtataagatgattcttcactcacaggtctgaaactatggtggggacagccagaaggctcggctcagctgggacagtcacctgagccctacacatgacctctccaacatggtgatcctgaagcagttgggtttcttacacagcatcacacttttcttttttttttttttttttgagatgaaatattgctctatcacccaggctggagtgcagtggcacgatctcagctcactgcagcctccgcctaccaggttcaagcgattctcctgctccagcctcccaagttgctgggattgcaggcgcctgccaccaagcccagctaatttttgtatttttagtagagacggggtttcaccttgttggccaggctagtcttgacctcttgacctcaggcgatccgcctgcctcggcctcccaaagtgctgggattacaggcatgagccaccgcgcccggccaaagctcacacttcttatgattcagccttagatgtcacatcagttcattttccccacacttattagtgttagaagtcacaagcccacccatactcaggggactggcacacagaccccactctcaatggaaggggtgggacaccaccattcctgctgatgggcatttgggtaacttcctgtttgaagctattaagattgggctgctgtggccgggcgcagtggctcacgcctctaatcccagcactttgggaggccgaggcgggcggatcacgaagtcaggagatcgagaccatcctggctaacacggtgaaaccccgtctttactaaaaataccaaaaaaaaaaaaaattagctgggcatggtagcgggcgcctgtagtcccagctactcgggaggctgaggcaggagaacggcgtgaacccgggaggcggagcttgcagtgagccgagattgtgccactgcactccagcctaggcgacagagcaagactccgtctccaaaaaaaaaaaaaaagattgggctgctgtgactattctagtaggtgtctttggtgagcgcctacacgtgtttctctttttctctttagtatatgcccaggaggggaactgctggctcccagataccgtatgttcagggtcacacacacttccacagggttttccaaagcccttgtaccagcacgcactcccagcacctgtgtgactgctccagctgtcccacagtctcatcagttctattgctgatattttcattttagcttaagttatatttaataggaaaattaccgttgcctctgccccccgttcctgcctgtaggagtttctcgtagctgttgctacaggtggccacaaatctgtcacttaaacccacacaaattgatgtccttatggctttggagtcagaagtgtcaactgaaggtactagcagggctgtactgacctggtggcctcagggagcatctgtgctgcttctccaccttctagaggctgctgcatccctcgctccagccccttcctgacaccactcaccctcctacttctgttatcacatcctcaccttctctgtgttcagggctccctctgtctctctcttgcaagcacacttgggattccattgagggccacccacataacccaggagaatttctccacctcaatatccttaacaactgcagagcccttttgccataaaagttaccattcacgggttccagggattgtgacatgggtagctttaggagtgattattcctgcctgtctcccgctcaccagaacttggactttctctctcaacaggagccccctgtgtgggaatagcctgtctcaacgacgccctctataaggacctgcttcctcaaaggacctcatagtcgggtcctgcccctcagtgtccagtctgccttggctggaggggctgcaggggtgtgttggcgccacctggtggagacagggcatcacagcaggtgggagcccagtagaagcacaaccaaaacatgggtaatgtttaaaattttctggctaagcgctgtggctcacgcctgtaattccagcactttgggaggccgaggtgggtggatcacatgaggacgggagtttgagaccagcctggccaacatggtgaaacatcccctctactaaaaaatacagaaaaattagctggacatgtggcgcgctcctgtaatcccagctactcgagaggctgagacacgagaatcgcttcaaccccggaggggttgccgagatcgcgccactgcactccaggctgggcgatagagcgagactctgtctcaaaaaaaaaaaaagaagaggggaggcgaggggaggggaggggaaaagggggaatttgtttggagctgagacatccatcttctcctgacctcagatatttgcactcctggttatgaagccttcacacttggactgaatacaccaccagctttcccgatttccagcgtgcaaatggcagatcgtgagacttctcagcttccataattacatgagccaatttatatatataaattgggtcctccagaaaaacagaataaattatatatataattatacgcataacttaattaaattatacgtataacttagctatatatataatttattctgtttttctgaagaaccctactgacacaaatgttgagcatcttttcatgtgcttattggcttaataacttgtacatcttctttggggaaatgtctattcaagttctttgcccattttgtaactgaactattaatatttgtctttacattgttgagttgtaaaagttccttatatattctagatactagagccttatcagatatatttctgcaactattttctcctaatatataggttgtgtttttattttctttttctttttttttttattgagacagtctcactctgtcacccaggctggagtgcagtggcatgatcttggctcactgcagactcgacctgccaggctcaagcaattctcccacttcagcctcctgagtagctgaggttataggcacttgccatcgcacccagctaatttttgtattttttagtagagccgaggtttcgccatgttgcctaggttggtcttgaactccctgcctcaaagcgatctgtcagcctcagtctccctaagtgctggaagtacaggtgtgagccacagtgcccggccatctattttcaatagtgttttttgatgtacacaggtttggaattttgataatgttcaattcatccatttttttttttttttttttggttctttctactggaccaccactcttgagccctctaatccaacctccacgcggcagccagagggagctctctaaatgtaattactctttccctgctccacctgctcaaaacagtgtcacatttgtgatttaaaacagtatttctcaaacctaatttgcaaacaaagcaggtggaactcttcttgtatgcacagcatctgatttggttggtctggcatgggtctgggagtgagcacacctaccaagcggctgctggggtaacttgcgttttccactgatgatttcagcaatgtttccggtcccacatgctcctccagaaccttgtactcccccatgaaaaggtggagtccatttccccttcctttatttatttttttgagacgaagtttcactcttgttgcccaggctggagcgcaatggcgtgatctcagctcaccgcaacctccgcctcctgggttcaagcaatgcttctacctcagcctcccgagtagctgggattacaggtatgtgccaccacgcccagctaattttgtatttttagtagagacggggtttctccatgtcggccaggctggtctcaaactcccgacctcaggtgatccgcccgcctcagcctcccaaagtgctgggattacaggcgggagccaccgcgcccggctatttccccttcctttgaacctgatcaggacttgacgatggcatcaacatggtgagagtgaccctgcatggcttatgaggctgggttacacaaggcgatgttgcttctgactggctccctctcaggatacatgcccttggaacccatcctctaagctccttgggagcccaacttagcccatgtggagacaagacagggagagaaacagaggcacccccagccctcagccagcatcaaccgccagacaggagagcaaatgcgccaacaatgattccagctgaagcctcagacagcgtggagcagagatgagggatccctgcagattgcagatgcgtgagcaaaatgcatgctgtcactgttttgaaacaacaatgtctgggggctgtttgttatgcagcaatagacagctgtaacaatgctgttactgctgtattccatgaatgactgcactttgagtagcagggggctagatcactagataagccccatggcttctgtgtatgctatttttctacttttatatccttttcattcactttttttttttttttttttgagacagagtctcactctgttgcccaggtgggagtgcagtggtgcaatcttggcggactgcaacctccacttcccgggttcaagcaattattgtgcctcagcctcctgagtagctgcgactatagatgcacccccatgcctggctagtttccgtatttttagtagagacggggttttgccatgttggccaggctgatctcagactcctgacctcaggtgatccacccaccttggcctcccaaagtgctgggattacaggcgtgaaccactgcacccagcctcattcactttctttacttggctcatttttccttgttgcctcaattctcctctaagatcactttcctgacatttcagcctgggcctgttgccttctctgggtcccctccgcctcctgtgcctcccccatctcagccttgatccctcagattatacttcctctgtccccaccctgaccatcttggctgtccctggatagggatgggtatcttctcccactggtctgggagatctggaaggacaggcctggaaaagacttggtcactgctggaaggagctcagttagtgtggtgctgaggacagtacgggtgaggctggccccttcacccaaactcccactctcttccatagatttcacctctgtggcccaggccataggattagggcaactccccttaaacatcgagtccatcctccaagctgtccttttttttttttttttttttttttttgagacagagtctcgctctgttgcccaggctggagtgcagtggcgcgatctcggctcactgcaagctccacctccagggttcactccattctcctgcctcagcctcccgagtagctgggactacaggagcctgccaccacacccggctaattttttgtatttttagttgagacggggtttcaccgtgttagtcaggatggtctcgatctcctgacctcgtgatccgcccgcctcggcctcccaaagtgctgggattacaggcgtgagccatcgcgcccggcctcatgctgttcttgaatagtgagcacctgttacaagtcgccccaccagcctctcacttgtacccccctcatctctttctccccaagagacagaggaccctggcacttgtgaagcatgacccagaccctggggccatggcatccaacatcctcattccccatgacccctactgtctagatgtagctgccaagagacccccagactccccgggcctctgtctagagtgccaagacagagagagaatgccctgccgcttgcatgctttgtggggtgtccttcccccttccctggctgctaggcgtgacttcaacgttctccccaacccccaaacagcagcactgacaccagctgcagacctggctcaggttagctaatgaggaccaggctggggatggagcctgaacccctaaaccccagtcctgtaccccaccctaatcctggggtctccactggacaaaacgaagcagcttggtttttcgttgttattgtttttgagatagagtatctctctgtctcccaggttggagtgcagtggcgtgatctcagctcactgcagcctccgcctcccgggttcaagtgattcttgtgccgcagcctccccagtagctgggattacaggcgcgtgccaccacacccagctaatttttgtatttttagtagagacagggtttcaccatgttggccaggctggtctgaaactcctgacctcaagtgatttcccagcctcggcctcccaaagtggaagcggcttatttttaaggagaaaactcccgtggaaaggaatcagcacctcctctgtcaacatttcacttctctgaaaagactctcacttccaacagaaagtgctttgtaacacaacaatgaggctgggcgaggtggctcatgcctgtaatcccagcactttgggaagctgaggcgagtggatcacgaggtcagaagttcgagaccagcctgaccaatatggtgaaaccccgtctctactaaaaatacaaaaattagttccgtgtggtggcgtgagcctgtaatcccagctactcaggaggctgaggcaggagaatggcttgaacccaggagatggaggttgcaatgagccgagatcacgccactgcactccagcctgggcaacagagtgagactccgtctcaaaaaaaaaaaaaaaagaatgagaacatatggacacagggaggggaacaatacacacaaacaaaatttagaaacaggtgaaaataattttagtaatatttttactaatactgatatgctcaaaatattattatttcaataagtaatctaaaaattattgagatgtcttatgttcttttcatcatactaagcctttaatatttggtgtgtattttacactcacagcacatctcaatttgcagtccccatgtttcaagcactaaataaccatgtgtgtccggtggctaccatactggacagcgttgatctgaaatcgcatctgtatgcatcaccagcatatttgcagagatccccatctcagcagcacacctgaggctcatctgcgaaagcacctgcaacttctctacaacctcccacatcacctccaaacacatcctcatgtcatctgcaaacacacccatagctcacaggccaatgcctaaatatcattgcaggcaccttcagagaaagcacttactaaaggggtatacttgattccacatctgctttgacctgcaaatctcccttctcctttacatacatttgcatctcatttgtatgtcaatctaaatccactggcagagcctcagatcatcatctcaaagtcaggtggatgtggggctgggcaggcctccaggtgttcctcctcctgcttcctctggggctcttgatcctcctcctcttccttgctgctctcctcctcctcctccaatatggtgaccagttcctcccgcagcgcccccatctccagccccaggctgcacagctgtcccagcagctggacatccactcggcgcaggttcccctgccagtaggaaggggacgtcacagggatgccaccccagagagcaaggggtctctccaggacctgggtgagagcaggtcccaactcatgtcctggccacagcgcctgggcagggtcctcactgtgcccatggaccctaactgccttcctgcttctcagagtgtctcttgatctctaactcttctctttgtctctccatttcattgtccctgacttctctctctctgtctcctccctctcttatctatatctgtccctgtttccctttgtctctgtccccatttattttttgtctttccatgcccctgtctctctgtctttatgtgttgccatttctctgcccctgcctttggctctctttctctcgcttgccctctctctgccctccccaactttctcaaattcagtctgtctctccatctctgttcctgctctccgtctctgcttcccacctctgtccctctcttttgggatctccctgtccccacctctgttcccgtccctcactctatgtctgtctctcggtgtctgtacatgcctctcatgtctctgcttctatctctcagattctgtttttcgatctctggccttctctatttttgttcatttccattcattctcatttcctctctttctctttcccttccaaacccctcactcaccagctcctccctgatccacagcagactatcgcaggcacctccagtgtctgcccctgcagtcctgagggtctgaccagggatttccactggggagacctccctcagggcctgggggggtgggcccagccccggaggcaccagtccagcctgattcagctgcctccacagttccatcgtctctgagctatggctgcaaggagcaggaagtagcaaggtccagggtggcctggtcccctggggagctgtgtgcgtggtggagagtaaagggcagagggagtgggatgggggttcctgggaaaggtatcccaaagtccactcttcagagagaatcagctggccttgtgcttttctttttccttctgaagtctaacctcaactctgctcacagggttcaaacatagcctcttgcagaggtctaactccacccttccctgcctgtctcaggcctgacccctcaggggcgctcagtgtctgtagatgcctggcaccctctgtccttccacctgccccccaccaccacttctccagcctctcctcagcctccatttgacctctggcttgcccatagcttggtccttgcttgtcctcttggcacgggtcatcctagggctttcccaccagtgtgcctttgggggcaggaatggctcccaggggcaccaagacagcaatcccttagctggagtgcctgtgtccaggctgctggcctagggccaagcagccaattctgctgaccctggacttgcctatgggtatattatccctgttgagggtgagggcttctgctgtggaaaagtctgggaagcactgcaggcctctctcggccttggacccttccttcagacccaaggtgcatatatatacatatatataatggtagatcacgaggtcaggagatcaagaccatcctggccacatggtgaaaccccgtctctagtaaaacacaaaaaattagccgggcatgctgccgcgtgcctgtagtcccagctactcgggaggctgaggcaggagaatggtgtgaacccaggaggtggaggttgcagtaagccaagatcacgccactgcattccagcctggcgacagagcaagactccatcttaaaataaacaaatgaacaatatatatatatatgtattttgttttttgagacagagtctcgctctgtcatccaggctggactgcagtggtgcaatcttggctcactgcaacctccgcctcccgggttcaagcgattcccctgcctcagcctcctgaacagctggggttacaggtgcacgccaccacacctggcgaatttttgtatgtttagtggagacggggtttcaccatgttagccaggctggtctcaaacccctgacctcaggtgatctgcccacctcggcctcccaaagtgctgggattacaggcgtgagccaacgcgcccagccccaagtcccttttaccatagaaagtaacatagtcacagtgcccagggattcacaggtatggggagagggttcgttattcagctgccacacccaccttcctaaacctgctgcccttccagtttcctcacgtgcacagccacgcccgtctgcttttagtttctcaatctgttggcttaaccttcaaaacaggcccaggatttgagcacttctcaccattccctctgccccatccccattcatctcttgcctagactgctacagcagcctcttttactggtcccctgcatccacccttgccctctaaggcaagggtccccagtccctgggccaaggaccagtaccagcccctcgcctgctaggaactgggccgcacagcaagagatgagcagcgggtaagtgagcattaccgcctgagctccgcctcctgtcacatcagcagtggcattagattctcataggaggcaaaccctattgtgaactgtgcgtgcgggggatctaggttgcctgctccttatgagaatctaatgcctgatgatctcaggtggaacagtttcatcccaaaaccatccccaccccacccccgacccccagtctatggaaaaattgtcctccacgaaaccagtccctggtaacaaaacggttagggaccgctgctctaaggtacattctccacctggcagaaataatctttacaaaatgtaaatccgattttgacactcccttcttcccactgtgaatagaataaaaccctaccaggcctgcaccgtcagcccctgcccacctctcaacccagtctcctatctctgtctgcaagctggttcccacctcaaggcctctctgctctagaggctacctctccctgcagcgcttttcccctagatctttgaatggctctttccttatcattcacttctacttcaatgtcacctcttcagagaggcctttgctgatggccctacacccagtcacttttttttatctgcttctcatcaaaattgccttgctgattcctttgtttcttattcatcctctcccacatccatcctctcccagcccagaatgttgacttcctgagagagggactgggtctgtcctgctcaccatggtaacctcggcatctagaacagtgcctgccatcacgtggtaggtgctcagtaaatattcttggaactaatgaatgaataattctatccacaagacttcacaatggctcttcatgctgcgatctagctttcaactccaaactggtcttgagatctcacctcagtctctaaccttgacatctaacctcttcacccactctcttacctgaccctaatttttaaaaatgacgtggtcagcttttcagccccctcattccctgtttttaggaggtagtgagtggaagctggaagaataagaaagcttggggagactgcaattgcagtcaggaaagaaaggtactctgccgggaagaacaccccatcttctcctagggaaagattgtggagtcctggggtttgttttgtttttcaattttttgttttaagagacagcgtctcgctctgtcacccaggctggagtgcagtggcgcaatcacagctcactgcaacttcgacctccccggctcaagtgatccccccgcctcagcctcgtgagtagctgggaccacaggcgtgcaccaccacgcccggctaacattttattttttgtggatataaggttgccctatttctttgtggagataaaggctcccctatgttgcccaggctggtctcgaactcctggcttcaagcgatgctttcgcctcggcctccacaaagtgctgggttcacaggtgcgtgagcccgacctgtgtctcgttttgaagctcagggagagggcgctgtgagcaatccctaaaccctttaagagtaaaaagtgcgtgcacctttaagaggacggttagaaaacgcggggcgtggccacaggagaataagttcgcgctgaaccaggagcgtgggataagaccggccccttccggttacgaaaccttagcaagatggcggctccctgggcgtccctgcgcctggtcgcccccatgtggaatgggcgtatcaggggcatccatcgcctgggtgcggcagtggccccagagggcaatcagaagaagaaaaggacaatactccagttcctgaccaactatttctacgatgtggaggctctgagggattacttgctccaaagggagatgtacaaggtgcatgagaaaaatcgatcttacacctggctggagaagcaacatggtccatacggcgcaggtgcctttttcatcctgaagcagggaggcgcagtcaagtttcgagacaaggagtggatcaggccagataagtatggccatttctctcaggagttctggaatttctgtgaagtgcctgtcgaagctgtggatgccggtgactgtgacatcaactacgagggcctggataacctcctccgcctgaaggagctccagtccttgtcgctgcagcgctgctgccacgtggacgactggtgtctcagccgcctctacccactggccgactcgttgcaggagctctcgctggccggttgcccccgcatctccgaacggggcctcgcctgcctccaccacctccagaacctccgcaggctggacatctcggacctccctgccgtgtccaaccctggcctcactcagatattggtggaggagatgctgcccaattgcgaggttgtgggagtcgactgggctgagggcctgaagtcagggccggaggagcagcctcgggacacagccagccctgtccctgcctagcctttagccctgtccccactcacgtggcttctcagcgggctgcatggaatgtctggtagctcaccacacttctggcttccatttgtcttcactcaacgtcagggtgggggagtggtgctggccaatcacaggagagagcgtgagttcccagtatttattcctggctgcccttggctaaaggtcacagctcctgtcaccctgtcaggcagccctttccatgcccctgttcaggcctggggaggtaaaggctcaggctgttagtagccgcagagagccacactcaccttgtcaggagactcttctcaaactgtccttatgtgagtgcactgccatttcttgcagggaccctgactgacacaggggctactactgacactttacagggatggttctcccccgtgcagggccgctgtgcccactgcaggacatgcagcatccttcgccccactccactcactaaaggccagcgcaccccaggccccatagtattgctggttatggatttattgactttatgttccaaattcagctttttcagttggctgttttttgaaaggggataagctttgtcagtagagggcaccgaacaggcattataggaggaaaggcgcctccttcgtggttcttgttggttgtgcttctgcctctggacgccgcagtgcatgtggcttccccagcacccagctcctgaagcaccaggcggtcagcagctgcccttggcaccctccagccctcagaagttgcgtaggagacacagcgcctccactgaggcacctctctgggaataacgttccccagcaccccaaatggatttccagtcaattcagaagcattttaccagtgaagccctcattattccagttcactgttaaagccagtaattctctatattaaactttccctgttcggtttatactccggagtataaaccgaacaggcctgccatagaaaatgcaaccacagaaataaaatggattgctttttttccctgtagtgaaaatacatttaaatctatctca

SEQ ID NO: 735296 - DNA, 188529 bp, Homo sapiens
ctccaaggctgagggatgaggagacctgctgaggacccagggccttatctttccatcccactccataggtcccagtattgactgatgctgtcttcacctcctagcctcacttttaaccttctggcacccgcccaccactgtccagttcactattgaagccctgccgtccagtgctgcagagggaaaggatgttcttctactggcctgcaatatttcagaaactattcaagcctattattggcacaaggggaaaacggcagaagggagccctctcattgctggttatataacagacattcaagcaaatatcccaggggccgcatacagtggtcgagagacagtataccccaatggatccctgctgttccaaaacatcaccctggaggacgcaggatcctacaccctacgaaccataaatgccagttacgactctgaccaagcaactggccagctccacgtacaccgtgagtgattcccccatacctctgggtgctggcggtcagttctgcttcacacacatgagattgtcaggcctgggctgtgcctgcatccccctctgcattttgtcccgtgttgagatttgggcatttagtgcaggacacacacatggtaggtaaacttcaacagatcagaattcctttcctgcatccaggccctgcagacactgatggcgggggcgggggggcctcagcagggggaggtcagtctcagccaagcaccccatgccctccccatgaacctgaccctgagaaagaccctggagaactgggtcagggcctggcctgagggcgtcctgggaacctcacaaaagcccagcctcaggactcctgactccgtgtgaccccgggaagcctgtgtcagggctggggtgtggtctcctgggcagggcttactgggagcaaggatttaccagatgtctgcgggctgtggttcctgaagcttctcatcagtgagggctcagctcccagagtctcatctagacaaggacagagcctaccactttccctgggactcagcctggagagggcagggggacaggattactagggcattggccccctgaatgaggagcttaagagatgcccttgggcagtcagtggcccaggggtaggaacagaggggagaaaatgttcctggcagcttcttgtccaccggggatcatgcccaggggtgctctcccatggaggcaaataacagatgctgttgatgtgaacacctcctctgtgccaagcttcatgtcagatcctgtgaataatttaaagttcattcacagacaaagtggcaagcctcagaccattttccatttacatattgtatggaggggaaactgaggcacagagagatacagacaccggccacggtgggcagatcgcagctggcagagtcacatgagggctgtctgcagctgctgccacgtcctctccttcatccctggtgccttactaggtgtctgtggaccttagaacagccactggttcggatgttttcttcttaggtgtctacagctcggagggggagattctggtctggagagttatgagtaaatacagaattaatcagttttttcttaactaaatcacctgcctcaacaatcagtcagtgctggggaagttcaggcctcctcgctcaggtccacaccccgcatctctggacatgaaatggcttcgtgtgttttctgatgtgtgggtatcattccaacaggaggataaaggggaggactttgctttctctccccattcacaccctgcaccagccagggcccagtgtgagacacatactccgtagttctctcatgaaggagggagggaatgaatgaaggaatgatctataacctcttcagagacagagacctggatacaagatcctaggaggttctgggcccaacgtgagacacacactctgtagttctcttatgaaggagggagggattgaatgtaggaatgatctataacctcttcagagacagagatgtggatacaagatcctaggaggttctggccacacctgttttctgtccctctagagcctaagacccatgtctcattcatctggcccgtttctcctaaatctgcccctgggagctgagtctcatctgaccctggggctgcagggctgtgggaaggttttcaggggagggatcaggcttgcgggtagtcccacacgtttgccttacaccctggagctctacctggttctcactatgaatatcccataataatcccccctatcctttctggggagtagaaaaaaagtaaatatttaaaaatatgccagagcatctgttcttcttagcaagttcagatagttattagttagcaggaataaatcgttattttaccagagcctcacctgctgggggtttatgggagcctaactgactgaggggggtgggaaatatccaactccagccccctctagccatcatgtcccacctaaaggagagaaaaaactgagaggcacttgtgacattcacagcccagggcacagactctatccaggaccacagaacccctccctccccccactcaccaccgcatcactgaacgcctgctcacccaagttcctgttgcccagtacatcatgtcctggctttcaacaaaaactacaagacagactagaggcaaaaaaaaaaaaaaaaaaaatgcagttcgaaagacagaacaagcatcagaaccagatgcagatgtggcagggatgtggcagggatgttgaaattatcagaccaggaatttaaaacaactctggggccaggagcggtggctcatgcctgtaatcccagcatttgggaggccgaggcaggcagatcacctgaggtcaggagttcgataccagcctggccaacatggcaaaaccccgtctctactaaaaatacaaaaaattaggcaggcatggtggtgggtgcctgtaatcctagatactcggaaggctgaggcaggagaattgcttgaacctgtgaagcggaggttgcggtgagcctagattgtgccactgcactccagcctgggcaacagagcgagattccatctctaaaacaaacaaacaaaaaacaatactggctaatatgctaaaggctgcaatggaaagcatagacaatgtgcagaacagacggatgctgtgagcagagagatggacaggctaagaaagaataacaacagctactatatctatctatctatctatctatctatctatctatctatctatctatctatatatatgtatatatatgctagagatcaaactcactgtaacacctggatctcagagtggttgtgaggatgtttattaggagattaaagagattaaagcagagttatacacagggcgagagctcaactgatgctatcaactagtattcttatttttttgatgttgttattggcaataaaatcaggaacaatgcagtaaaaatttggttttatcatgtacgagttctgtgaccttccttgacttactgaggtactgtaagtctcagattctaactctgcagatggcggtgatgcccctctccctcaaggtgatgtgaggatgagatgagctgtaggtaggttggtgcccactgtgcctggcacatggaaggcccctgaaaatagtcaatgaacatcatccccgctcatcagcatggagttgacagtgagggctcgctctctgtgacaatcatggaatggaaaagaagaaacaagaggaagactgggcgcagtggctcatgcctgtaatcccagcactttgggaggccgaggcgggcagatcatctgaggtcaggagttcaagaccagcctggacaacatggcgaaatttcatctctactaaaaatataaaaattagcctggcatggtggcacaaacctgtaatcccagctacttgggaggctgaggcaagagaatcgcttgaacttgggagatggaggttgcagtgagccgagattgcgtcagtgcactccagtctgggtgacagagcaagactccatccaaaaaaaaaagaaaaagaaaaaagcaacagagggaagaggtgtgacatgagaggaagaagggatttaaaggtacaggagcagggcgaggtgcaagcacctgtgggagaatgtaggagttggtacatcccagtgtgtcaagtctgagacacagaaaatggtgcaaccgtggagagcaagggagtcagctatgaggacagcccaacagaccacactcaggctctggagcatttccttcctccctgactatgcccctgccctgcaatgccccttatggtttcccttggaacaaacttgggccttgtcccctttgccttcccctttctgcagaaaacaacgtcccaggccttcctgtgggggccgtcgctggcatcgtgactggggtcctggttggggtggctctggtggccgccctggtgtgttttctgcttctctccaggactggaaggtaccgcagcttttccccagcctcctcccacccctaggctgaccccagtcagggaggagggagaccccgccctgtattcagggccaggctttccgcatcctcccaaggaatccttccctctcattccatggctcctcccttgccagctgctgatcctaggctgcctcttcctttatgaatgtggcacagttaaggttgcacccctgagtgctgtcctagttccctaacacagcaaagccacagctgcctggagggaggaagggagggagggagggagggagataagacgggagtgctcagaacctggtaccttctgctgttcattgaatttacccacccagtgaggagggatttgcaggcttgagatccatggtgggggtcctgggcatggtcacgcagtggggagtggcaaagcctggacaggctgggtagggtcagcaccccatcgtgattgatgtccctgaggtgtgagatgggagaacctggacctcaggacctgctgtcctttatgtctcttgccaaggggtggagagagagaggacaaggccattgccccatttcagcatctccaggcctgaaaggagggtctggccatggcagggatactgagttctgggagaatatgatacatgctccttgcctccccatgcccccagctcccccagtgtcctgcacacacagccggccctgctttccctctggggccttgacccttcctctcaggcaaacgcaggtggtctgattccctccctgagtcctcagtccctttcctgggtccctgggtcaatgttctcctcacccggcatctgcctgggggggtccttcctctctggccaggacagacgtgactgcttaaggcctatcctcagctccccgtcctcggccgctcctaccacgaaactgatggagacaggaggccttcactccagtccttgaaaatggagtcccttccttgtcctttattctgcccctaaacctgtgatttctccctgcaccctcatgaataatcctgacctttcctagggccagcatccagcgtgacctcagggagcagccgcccccagcctccacccctggtgagtgtcccttcagcccaggtgtgggagcccctaggcctgccctacggtgtccactcctgccagtcaccccctgggggcctctgaccctttctttggggctgcaaggaggatgtcaggaaacatgacacaggggaccccgactgtcttgttcagactgatctgtgggctctgggtcgtgggtcacctcctcgacctcagctgctcaggtctcccctgggaagaggctccctctccctgattctctgggagctgaggacccctacactctcctgcaggaggggcccaggctctcctcccaccctgctgctcactcctgtctctgtccccaggccatggtccctctcacagatccaccttctcggtaagcctgttccctccccagcccttttctactggggtcccaacagtgcaggctcagggcagggggaccatcaaccccacagcacagcactgacccacctttccccagaacagtcaggtcaaagtgagtgcctccagccaggatccgggcctctctacagggccaggaccacccacgccatgtgctgacccctccccgggaccctctacacctgaggagaaccctggagtccagcaggtgcagaatggacactgggaccatcagtcagaggcccacattaacaagggtgcggggtgggcccagccaggacaggggtcagggtgttgtgtccacactgggaggctgagctcaggggcagagctggtcaatcctgaggggaaatgagtggaagtggaggcagggaagtaagtcctggccgatcagagacaggaaccttccaggctgggcttccgtgaccctccctccctgtcccctgacatctcctctctcccctgcccaggcccctctacccagccccagaacagccactcccatctatgaggtgagtgtgggccatggatgttctggtcccgcaggctccaggggacccaggatctgcccccaccagcacctggctgagctcagattcaggaaaatgcagtgaaaatgagaacaggtggtggtgagcagaggagggaggggcctgggaacagggaccccctgagcacagccaggttcagccccagagaagccctgggtgggcccagagcctgggagatgccagacactgttctgagaaggctacaggggttgaggcctcttctctgtttttacaggaattgctatactctgatgcaaacatttactgccagatcgaccacaaagcagatgtggtctcttaggttcctctgggagctgctcttgtgggttgatggagcgtccccaaagctcccagccctggggacggggaaggacatggagcctgagccagagaaccagctctgagtcctgaggagacacaggcctggggacagggagggatgggagtccctgctgaatatctggagaccctgacaggttgccctgggctctgggtgggccgggacaaaggcctctcatcaccacaggaagcgggggcttgcaaggaaagtgaatgggcctgtggcccacccggggtcaccaggaaaggatctgaataaagaggacccttcctctcattggctctttttctgctcacgggaacttagcagaaactcacctgaaactccgtgtccattctctcccgggtcacacagggaaaatatctccaccttgtctcaaccacagtctctcttccctgggaggcagaaataggggttgggagtcaggctggggtgggccctacacaggaaagggcaagattcacatgagccctgcccagccagccgagcgctcagctgtcctcacactaccccagggaccaaggccatgcacagccccagcctgggtccctctgtgaatgcatgtggggtctcaggagcacagaagatggggccatctgatgtccacaaaaggtgagcaatgcgggagcaaccatgggtggtataggttgcggctgtggcccctacgcagcctccagtgtcctgacccctgctgccctcttcacccaggccctggaggcccagtctatcactgtcctccacaaatgaacttacctgtccccaaatccaggatcctgtgtgcttatacctggccactaggttctcctctgtcccagtggctactgctcaggacatctttatccctggtggggcacagagaggggctgtcagagcaaccaagattaatacagacgcataattcagtccttgagcactacccaggactctggcccctcattgctcatcagttcccactttaccccctggcatggatctcactgagcaagccaactctttacacaggagcatccaggtcagaggtgcaggactcccccatctaaagctcatgcaggctcccatggcgatgggacaacctgtctgctcctctccctggcccacagccctatctcgcctgcagctcctccacacacctgggacagcagttctcagcccttccctgagggcccctggaagggtgatgatctcatataggttcacttgaaccaggtgccaccttcccacaagtgagctggtgcctgcactaaagcacagagccacagttcccaagagtgttctgccactgccacaggtcccaagagtgttctgccactgccacaggttgttcgtcctgagatgagaggtaagaaaacaacccgcaatgggttgttttatatcgggatttgcatcaggatttagctctaaatgacccctgatcccacctgcacacagcgtcagatgagacaaggtgaggcctctttagttttctgttgaggctgtgacaaattaccacaagcttagtgacatagaaacctgaaccaaagtgcccacatggctgtgttctttctagaggctccagggaagagtgcatttcctctccttttccacctcctagaggcctcctgcaaccttggctgtgtcctctttctccatcttcaaagccagcagcacagcatcttgaaactattctgtgccctgcttccatccccacatctccacctcctcccacctccctctctcacttaaaaggaaggagccttgtggttattttggacgcacctgggataaaccacaacaacctccccatctcatgatccttcctttaatctgtaaagtgtcctttaccacgtgacatgtccacagatctggggatgaggatgtacacatctttgagaggcccttgttctgtccatcactcctctcaaggccatcttctcatcatcgttcactacaaactacacatgggcacctggatgggttcatcatgactgtggcgtcagttcctgcattaacatccccagcaccctccagatcctgagagagggagacggagggctctccatgcccctagtacctctccaccttcttcttggtgacatgcttagttgctaagaataacagaaagcggaggtgactgaaagatcacaactcaccggcccttcaatagttcgtggacatcagcaccacggacagtgactcagtgaggctaatttccaggtggcagcagggagcatgcagataggagggaactgcaggaaaagctgcccattctattctatatgagaaagagtgtaagaaagaggaagctattacagggataatgctattcttctctaatccataaattgcgaaacctttgcatgtctggatatcatggtttttagcacatctgctgccactccctgcagggctgattgctgcatccaggatgtggtctcttggggggctcacagcctgctttggcctcatggtgagtctccctgcccctgacactcaggccactgtctctgcctacaacatggtgggaaccttccatgattaacgtctgattctctgtgcctgacctttgaagcacatccatcactcagcctggagcatccgctgagctcagcatcctgctcctccatccccagctgagcccttgaggagatgcttgagaggatctcctgggctcctctgtgagctcctccaggctgagccttgtgcttggtgtcagaggcctttgccatctgcttgttctttccataggcaaataatcctcctcagggacaagtggggcctgaagatctgtctgaatatctatctatctatctatctatctatctatctatctatctatctatcatctatctatatgtatgtatatatgagaatgctttattaggcaaaactgcatactatgaacatgctttaaaatgcaacaggatgagatgtgaagacataaagaacaagtgtgtagtgacacatggctatcagaacacactgaagaatccacaccgcggccgagagcagtggctcacgcctgtagtcccagcacttttggaggctgaggcaggcagatcacttgaggacaggtgttcgagaccagcctgaccaacatggtgaaaccccatctctactaaaaatacaaaaaatttagccgggcctggtggctcatgcctgtagtcctggctgttcgggaggctgaggcaggagaattgcctgaacctgggagacacaagttgcagtgagctgagatcgcaccactgcactccagcctgggagatagagtgaggctccatctaaaaacaaaacaaaacaaaaagaatccacactgcttccccgcttcactttacccagaaaaggaatgttctaggccacttcctcttcagcacacatccccagggaactaaaataggttcacagtcacccccatcttcctcattcccatcacctcttacccacagaggcatctctggtcctacagatccagccctgccttcaagaggcacaggtccaacccatccagtgtccctgctagtcacacacagcactcagggtacaatggagggcttctgtgctttggatgggaacaaaccccacctcacattcccacacctgagaagccaccagggtcctctctgtcctgtcctcacactcaatgtctgtcctgggtcacccttgtcatctctcctggaaataggcatggctcctgacaggtaggattgaggctttgtcttttcaggagtccctcccactctgagcacatgaaactgctcagctccatgcaaccctctctcaccaggggccttgttctctgggtccctgaatacctgggtccatgccatgtacattttaagaaaaatgacagtgactctcaccctgacatcctcacccaaggcacgtgtctgacaagaatcaccaggtgagatacctgtggctccacacacctgaggcttcactgcgcaggggtgtcctcatccctctcctcccacccctagggacagtaagcaccacaggctgccttggaccaccagctccccctcccagacacagcctcagatctatactgacatgctacatggagaggctctgatgaacagcaggtattaggaaatcccaccgaaccaggtgccacttgcggccccactcctcctcatatctgtgactgggacagacacacataacacacctctgttcaccgcccagcccccaaggtcaatcacagtctgcttctcccctagatccactgctccccatgtcttccgtcctcagctgcatcctgggtggcctccttgctgttcttgtaccccagaggcaggttccaacctttgtgatgttgcctgcaatgcccaaactttcccttccccttccccttcccttttcccctcccccttcccctccccttcccctccccacccctatcccttcgtcttcccttgtcttcccttcccttccctataaagccaaacatacccatccacctaccttgtggtcaaagtcatcagcctcctgctccactcagtgttctctgaccctgcatatggaggtggtggcccctcctagaacacccaccactcactgtcagccttgcgtggtaatcacagattttgcaggggttacctgtgttcaggtgtgtcacctgtggaaccagaactcttggaaggactggcagagggagctgcttaggatatctcagggctcctggcatctggtctaccacagggctattaacaacagcacttagggacaaggtggaggatggacggttaagagggtaaatatggatgatgtgtgggcaaagaataggacacaggaacacatgcagtactcaaataattatgccaagaaaggtgaggacatggagatggacattcccatatacttctgatgggactgcagtttagtccctacagcaacattgacctcatcatgtttaacgcgcacacgctctgaccactatcctacttctgaaggcctccctgtgctgtgagctctgagaaggccaagcttgcctgttctgtctctgctaaagccagagaccagccaatagcccagcacagggtacttcataaatacatgttgaaggaatgagctccaggaacagtactccacatggtagagatgtgtgtatgaggatgttcactgcagaaggtcatgtcaatgtgacaagtgacgagcagcctcaaatccagcaacaggggtgtgggtaaaagatcatagtgtagccatgcaatggaaccaatgaaaaaaccacaattagagcaaatccacatgtattaataaaggaggtgccctccatacatgctgcacctaacagaatgttgccaaataagaatgaaaaatgatgatatttgggctgtaaaaactagaagtcagctaaataagaatgcatcgaaagtatttgtgaatgcttacaattttataatgccttggcatccgttttggatggaagttggactttctcataccagaagcagggctcagtcacctttgaaatagtttccagttctccacctccttccagttcctcagtgtgattgatcagatatctgatttatacaactgcctcctggtgacctcctccctatgggacttccggatacagcccgtatgactgccccactgaccccacaccctgcctgctgcagtgaccacctctaattacctggatctcatgtctgcttgcattaaatccaccaattaaaactccctgaggacaatctgtttgaataatattctgtaccctaataaaggccttgacccatgggttccccctctgtcctccccatactgcccctgacctctgtgtgtgtgtgtgggtgtgggtgtatgtgtgtgtgtgtgtgtgtgtcctccagacagggcctgtatcccccaggacctgtaagtaataaatctttattttcatcttatgtctctcgcaatcattggcaagagctctgcatcttaaagatcgcaaatttaagaaattggtgtagtcggcacaatagagtacctcttctgtttagcacaagatatctcggagctgctgaggcttttaacatcctcgccggtgtggctgcctcactggtgaggccgttctgttcagtgcaattcagttgctccactgtgtgctgctgtgttgctgctgtagagtgctgccatgttgttctccccaaattgttaccgagtaggaacctgtaatgtgctcccaaggtggtctaccccatgagaagggggattctccatctagggcaagggctaggtgtgtttctggaatcctaatagggaaggcatccacagagggtgaactccactcctccttagagtgaggagtgacatttcccatttattttccccatggaggtgccatgtattgactttttctttcactgtcccaaggttgagccaaggtgagctatggagaccagggcaagataccatttctgttagcaaagcaaatgggtgacaacgtgtggagaagctgtggttctcctgatggatatagcagagtgccatttagtaaaatcttgtcaggaggctgcccctggttagaccggcagtgtctgtagtcactaaggtggatgcgaattttaggccctgggccatggataatccctgcagacacagccgtggcttcatgtgatggggcaatcccgggctagtggctcccttgtttctgcatttcttgctgtggttgcacaatcaacacctcaggggttgattgggtcaccttggaaagagaaacagctgcctaggaggctggtgcacatggaggccaccctcaattttattctgctaacaagttgtaagattaaaacaacagggggctttgggtaccatcaggaacttgtcaagtaaacatccaaagacagaaagaagaaaaagaaaaagacattaaccgtctagaaatacaagccattttaaagattttgcttaaaagatgcgcttgggctgggagcggtggctcacacctgtaatcccagcactttgggaggccaaggtgggtggatcgactgaggtcaggagttcaagaccagcctgaccaacatggtgaaacctcgcctctactaaaaatacaaaaaattagcagggcatggtggcaggtgcctgtaatcccagctacttgggtggagaatcgcttgaacccgggaggcagagacggcagtgagccaagatcgcaccactgtactccagtctgggcgacagagtgagacttcatctcaaaaaaaaaaaaaaaaaaaaaaaaaagacgggcttgtttcgtcgttgtggagtcatcccagagagaggctactccctagagtcactgaccacctttcctcctccatcttttcctcttatcattctagagacagaaaacaagaatctcagctttaggtggctaacctcaccccccaagaaaagaaactaccactttgattgactacaaatccaagaaaaataaaagagaaactttaaaaagtactgagcaaaccacaggtctagcaaacataatgctagccctaggttacttattcatttacaacaaacccctagatataggaggaaaaaataaaaggtaattaaatatatacacatacaatattttaatataaatatataataaatagttaaattatgtatgtataatatgtaactaaatcaaagtaaaatttcatactttgattctattggaaattcaaaattcatttattaacttatatattaaggaatttatgtaaaaaaagatttttaaaagggcaccaatttgcttttgtgtctctacaacataggatctaatttaactttacatttgctaaatacactaattgacaaatattcatggatttaatcaatactggggctcaaattgtagccacacgtgggaatcccataaatttaaacactctgtccctattatcttgagaagaaaactaaatataaaattgaaaaaaacaggtatgtctcaatttacctgtaactttgcctaaatttcccggagtcatatacccattgctgtaaaacattctctattggacataggtgctctgagacaataaataaaatagaagtgtttttggtacttagacattggcttgacaaaatgggatcccatgaaacctcagttaagatagtgaatacggcccaatgtgagttgaaatggggcctttaaggattaaaacttattacatgaaacctagtaagtaatggggtgattatccatactgcttctccatttcatagcccaattttgacagttgtcaaatctggaaaaaacaaacaaacaaacaaaaaaacccctgggaatctgttgcctcacagagacacaaagtagacatcaaaattgtatatctcagttccagttccaaaatggtggcatagaagcaagctggctttactccttcacacagaaaaccaaaaacaaatatacagcaccaaaattattaccagatatattccagaactcaaatatgaaaatgaaacagttttcagagccacagagaagtgaaaaaaactcccgacagatgacaaaagaatcagatttccccatctgtaatgtccctccctgccccattctgcctggtaccaggtgtgtggaaaattttaccccaactcatggtttctacactgggaaatgtaagatcaatgcgggcaaccagtttctgcacaatcctgggttccctgtccctgccttaacccacaagaagcattgtgagtgcccgaagggagaaatttccctgaggacagtcaaagagtggggaggcaggactaccatctccttccctggaaactctgctgtgtaactcagccaagggagacatgaaatcagactggtgtttcagcagctccatgttgtagtaggtttgtttcacaggtatcctgggcatggacatctagccagctttcccacactgccaggatatcccctttgggacctccctcagttaggaagggcacactctgatcatttactagggccaaggtaaaccctaaaggtaacttagagatgaaaaggaggtagtgacctagcagtaaagaactctaagaaaatctatccaataaaaatcaaaacaagccagacaaagactaaaataaataatgaatccttcaatgtaaagacctggacttacatccacaagaaacagtaagcaggtaaccatgatctccccacatggacaaagtgaggaacaagtgactgatcctgatgagatggtgatgtgtgagctctctaatcaagaattcaaaactgcagttttaaggaaactcaatgatcttcaagaaaacatggaaaagcagttcagaaatttatcagagaaatttaacgaagggattgaaataatttaaagaaaacaaacaggaatcttggaattgagaaatatatttgctgaacaggaaaatttattagagtctctcaacagcagaatggatcagaggaaagaatcaacccaaataagactcccccaaggcataaaataatcgaattctcaaaagtcaagggcaaagagaagattttaaaacagaaagagaaaagaagcaaatggcataaagaagctccaattctgtggcaacagattttcagtggaaatcatacagaccaggagggagtgacatgacattctcaaaatgctgaaaaaatattgacatttgagaatactttatccagtgaagttatccttcaatataaaggagagagaaagtttcctagacaaacaaaagctgagataattcacaccatcagactagtcttcctgtaaatactaaagggtaaatactaaatacttcaatgtgaaagtaaaaaaaaaaacactaacatgcaaaacaaccacaacaacaataacaacatttgaaggtataaaatccactggtgaaattaagtacgtagacaaacccagaatactcaaatagtaattgtggaaagtaatccaatcataactctagcatgagtctcaaaatataaatctatcaaaaacaataatacattttaggaggccaaggttggcagattccttgaggtcaagagttcaagaccagcctggtcaaaatggtgaaaccccatctctaccaaaaaatacaaaaatttgcagggtatggtagcacatgcctgtcgtttcagctatttgggaggctgaggcaggagaattgcttgaacccaggaggtggaggttgcagtgagctgagattgcactactgcactccagcctgggtgacagagggagactctgtcttaaaaaaaaatagctacctgtttggagaaaggtaatataaaatatgtaaatagagacaaagtcaaaatttgcaaaggatgaaattaaagagtagagtttttttggggggttttctgtttctattattttatttgtgatctaagataagttgttaccttttcttctcttgaagatactttgttatatctatgtttttggaagtcttatggtaactgcaacgcaaaaaatctatgatagatccactgaaaataaaaaacaatgacttaaaacatactaccagagacaatcaaccacaaggaagacagtaaaaaatgaagaaaggaagaggggagttacaaaacaaccagaaaacaggcaacaaagtggcagtagtaagttcttacttaaaaatattgaacactgaatataaatggactctattctccaattaaaaggcatagagtggctgaatgctgcctatatgctgcctacaagaaaccacttcatgtaaaaagatacaaatagactgaaagtgaagggggtggaaaaagatatttcatgcaagtggaaaccaaaagagagcaggagtagctatactgatatgagataaactacaaatcaaagactataaaaagagacaaagaaagtcactatgtaatgataaagcgctcagttcagcaagaggagatgccaattataaatatctatgcatccaacacttgagctcccaagtctcccaagtatttaaagcaaacaatagtggatctaaaaggagagatagactgaatacaatattaattaggggactttaacaccctgctctcagcaatggccagatctttcagacagaaaatcaacaaggaaacttcaaagttaaactacacactagatcaaataggcctaactggcatttacgggacatttcactaactatctaactgttacagaattcacattattttcatcagcacatagaacattcttcagaacagaccacatcttaagtcccaaaaccagtcagaataaattcaaaaaagtttatatcacatcaagcatttgttctgaccacaatggaataaaactacaataaatgaataactttctggacacatacaacctaccaagatggaagcatgaaaaggcagaaaaacccaacaaaccaacatgaaactgtaacaaaaggaaaacccaggaccgaatgacttcactgctgaattctaccaaacatttaataagaactaaaaccaattctactcaaaatgctttaaaaaattgaagaggatggaacactttcaaactcattctacaaggtcagcattatcctgataccaaaaccagacaaggacaggacaaaaacaaacaaacaaacaaacaaacaaacaaacaaaaaaacactacaggattgcttgaggccaggagtttgagatcagcctgggcaacatagtcagaaccaatctcttaaaaaaaaaaaaaaagaaaaaaattagccaggcatggtggcatgtgcctttagtcctagctactcgggaggctgaggtgagaggaccaattgagcccaggaggttgaggccgcagtgagccatgtttgtgtcactgtactccagcctggggaacagagcaagatgctctctcaaaaacaaaaagcaagctgggtgtggtggctcctgcctgtaatcacagcactttggaaggctgaggtgggagaactgcttaagcccaggagttcaagaccagtctggacaacatagggggactccatctctcaaaaacaaccaaccaaaacaaagccaaaaaagaacataggccaacatcactaacaaacatagatgtaaaagtcctcaataaaatattaacaaaccatgtttagaaacacatcaaaagagatcattcactatgattaagtgagattcatcccagggatgccagtatggctcaacatatgcaaatcaataaatgtgatccatcacattaaagagaaccaagaacaaaaaccatataatcactccagcaagtgcagaaaaggcatttaataaaagaatgggttgagggagtggagcccatagtcagagcagcagtggtctgggattttggaagtagaaagaagggcagcaccactggccaggaccaccagggaacacccccataggccctgggtgttgtgctccagggagggttccctctggagttattaatcttggtgtccactttgcccagctgcccctcacagggtcagggaggatgaagggaaagcttccttctaatgaaagttcagggactcacagttcctagagcctgtagggagaggaagatcttcgaggaagagcacctgggcattggggcgtttgagaggaagatctatgccaggtccaagtggacaacctgtggactctctctccagggacatacgggtatctgggaatctcctgtagcttaaagaggtaaagacctctccctttagcctgaggactggaggatgctggttcaggtgaatgagtcctgcaggggctggtacaggcctggagggtggtggtgtccagggccttgggttcacccttagcatgattcaggccgggcggtgtttcacatgagcaagagggcctgggttcattgcttcaggacaatggtgaaatctcatggtggaagaaatcttgtccttgccagtgcccagctttcatttggtcttggcccagagtgtcctccctagagaagactcttgtcccttcttcacactgcccttcagggatatgccagccttatgggataagatggggtggagactgtagatgtgggtgggaatctctccacagagtgctccttctctcagcggttgcaccttgtctcagggcttcagcttgaaatctgggatctccaagcccttccctccccagtcctggccaggaccacatgggcagatgcattgtgtgaagtgcatttcatttggggtgtcctctctgcatggcaccctcccgttgattctctttgcgcatgtcagagtgcaggcaccatccacacctcctgctggaggagggacggagctgttgactcctgagagctgatcatgtgttcccaccctcacacacaatcatggtccatcctctgagggacatgtgttgccaccactgtggagatggtgcaactgacagtaacaaacagtaaaatctggtactgaatgggaccttaagccaacaatgacaatgtcattccaaggtgtttcatttttattgattcaatgcaagtcacctgatttcattgactattcacaatagctcgataaagtaaatgcatcatcaccaccactttaaagaggaaaaaggtgcttgggcagtttgtgactactgtggtggctgctgcattgctctctggtaaagccaagtaggtggtgggtgcggcctctgggctgggatgatccaccctcctggtggtggcaggggagccaagctggagccatggcctgtgcagtggtagcagctgaactgaccgctgctgcaggatttgcaagctgttacattttgcgaagccatgaagcacataaaacctcaagtagaacaagtgtttcaaagtctaccaaaatctgccttcagagattattactacagaggtggatatgaacccaaaatgacaaaacgggaagcagcattaatactagataatgaatgaacactagtaatagtagggtaagccctactgccaataaagaaaaaaataagagatgctcattaacatgttatgctcttaaatcacgcagacaaaagagggtctccttatatagtagccacaatcaatgaagctaaagatttactgcaagatcaagctaaaaacagtaggtgtataatgaatttttaacttcatattagtttatgtatatgaatatcaagtttttataataaaatgcctccaaacaaagaatatttgatttagggtttaataacttctaagaggggactcagatgtttcctgtttcacagtcagtctgagagggtcatttttcctggagctgacctgggtggaggcctcacactgatactccccagcatcctctctcctgatggggtttatgctgagcatacagtggccctgggacagctccattctctccatgagtcacagacgctggtcatggaagatccactggataaggttccagagtcatctgtggggcaggtcaggatcacaacatccttttcttctgtgactctggtgttgctgactcagatggggtcggagccactgaccctgtggacaatcagtggaggtgctcaactgaaagtgggctgagggcacgtcttctcctccatccctgggtccttaaggtaactgtggaccccagaccaactgacacaggagctagaaagaaattatttaggaagttagtgagggtaagagcgtccttggcaaggtttcccctttaacaaaaagcagcccaagataattccttttctaacaaagagcagcctgaaaaattgagctacagatgtagatgagcaagatggaagcttgcacaggtgaattccagtaggtgtgccaatagaaaagggctgcctggaagccaggtatgttcaacatggagactccatcctcccttttctccattaccacatgtacagtaaaaaaccaggcaacatggcaccggccaggtagacaatccatctgcatgacaaaagatcagagtggggcagccagcaaatggcacagctggtctaaacaatctttcaccccctgtataaatcagacactgcctcctgaagctcatctataaaaccttctgcatttcactatggaagtggcaacccattttccccaggacccctctctctgtgcagagagctcttctctttctttcccctatgaaacttccactcttaacttcactctgggtgcctgcatcctagttttccatggccatgggacaatgaacctcgagtattaccccagatgaatgatgctgtttcacaatcactggttcagctcccttcttcttagggtttcacagctcggtggggagaataccacgcctcagtggtctggggagtgaggaacaaatgaagaattaatcagattttacttagaacgctatcacctgcctcaaccatcagatccatgttgggaatgtccaggcctcctctcttagatctatacccacttcactggacctgaaatcctgtgtttcccgatgtgttggtgtcactcctatgagaggataaaggagagaactttgctttctctccccactcacaccctgcacaagacagggcccaatatgagacacacactcgctcagtagttctctcatgaaggagggagggagtgacctcgagtgattctgccatctgtagtctgtgtaccctggccagtggctgtatcttcatatgcctcagtttcccctcagtaaaataggacacacaatgagaactaaaaataaaattctaattccccagtgaactgaaaggatggcctcttggccaagcggatcccagagttcctgatcatgacaggatgggaggttacacctcattacagcccctccctttggaagtttagaggtgacaactgactagcattaacgctaaaatcgagatcatgagactgacagaacagactctctgtggccataagataccaaattataaactcaacctaaggtcatgcaggcaagggctaagccacactttcctacatttaaagaataagctatgttctaacacagaattttctttctctctagcggctaaagtaacactagccttcgagataagcaatattgaaatgatcgcggctcatccaccaacactggctaactgacccctgttccaacagccacaactacacttcaattggacaggagactgatttcagtaactttctcctaataagagaccactgagcatggcctggttctgctggtatacagacacggtgcactgagtaccataatgcttgtttcatcttttgatgtataagacctaatttaatacatttaaatctgaattctccaccccaaagtgaacatggggtgcatgtagcatgcatgtttgttgatcacgcatgtgcgtgtacttcctttgtgagtatccatagctccacctataacctgttgaatatgtatacctggccaactcattcagcataaatctatcttccacattcccctcccttgaagtgcctgctattggtctctgctggaggctgcatcttctaccctggggaatggccagcctgcaggctgtaaccctgtgtaagaaataacctggttgggtgcagtggctcacacctgtaatcccagtggtttgggaggttgaagtggtagaatagtttgagctcaggagccagagactagcctgggcagcatagcaagatcctgtctcttaaaaaaattttagggaggagagtgaggatcagaaaaaatacctattggctattatgcttagtacttggatcatgaaataatctgtataccaaacccctgattacatatataacaaacctgcatgcgtatctttgaacctaagataaaagtttgttttaaaaactatctgggtgcagtggtgcatgcctatagttccagctactcgagactgaggtgtgaggagtgcttgagctcgggggattgaggctgcagtgaattatggtcccacctgtgagtagccacttcactcaaacctgggagacagagcaagaaccggtctctaaaaaaaaataaaaatagaaaaataaaatgaaaaatatatgaaataaagtctcctttccaaacgtacagatctccgatttttctgccaacaatgataaatggtcagtggcttgccatgttgtctgtgaattacttttaaaatattcacgatcacctgacctaaaggttggtaccaaggaaccgcctgaatacaccgtctctgattatttgcctccaacagagtgttccctgggcctgatctctggtggacaatgagctgctgggaacatcctctcttctctattcctcccctggggatgctgaccttcccttggagtctcctaagttccccagggcagtcggctaatgtcctagggagcttacctgtcttctccataccaagtctcatgtgaaggacgaggctttgcccttgcccagatgaggctctgggggctgagccctggctggctaccagctgcaagagccatggcccttggacagctggtaaatccttgttcccagtcagccctgcccaagatgcctcaacccagccccggcacaggcttcccagggtcacatggagtcaggatcctgggacaggggactggacaggggtttccagggctgagtttctgaacaggggcttcccaggggtcccctcactccaggatctgacatggtcctacaaggaacgtccatggggaggggacccaggagggggaactgacactgacctccccttactgagcctccccccaaccccatcagactgtccttcctctgtagcaagtgcctgcagggtctggatgcaggaaagaaattctgatctgtggaagtttgtctcccctgtgtgtgtcttgcactaaatgtccaaacccccaaatgggatgtaatgtagagggggacacaggcacagcccaggcctgaaaatcctgtgtgtgtgaagcagaactgacccccaacacccagagctcatgagacatcactgtgtacgtgaaactggccagttacttcttcattcacaagatctgtttttatgacttgtagggtgtaggatcctgtgtcattgttggtgacattctgtatcagcagacatgtattggggtatattgtctctcagcctctgtggcaggtcctggggtaattacttgagttcctagtacatatcctgtaattcccctttgtaccagttgtagccaagcctaaggcagattgtgggtgagtggaagaatctccttgccttctgcagcttcaacagtgacttgggcagtggtaggcaagttccagaaagttaaaagtgaggctaggagtggggagagagcatcagttaatactgggccctatgcattgaggtggaaagatggggccctaggtcctggacaggtctcttcatccctcagccttggagtgtgtgtgtgtgtgtgtgtgtgtgtgtgtgtgtgtgtgtgcgcgcgcgcgcgtgcgtgcgtgtcctactgggccaaggtcagcagcatgacctcccttccttcagtgcctctgaccttggcatttccctgtttggagtccttttccccaggggtctgcctggctccctccctactgccttcaggtcctgctcacattagggcatccttgggagaccccttccctgacacctctagagaccctgggtcttccctttctgacctttcgctgctgtgttccctccagggctcttgtcaatacttgacctcacattctagatacccttgcatgtctgtcttcctccctatgagagcatgagctctgtgagaacagggacttgtgtgatcttggttgcaccccagtgcctgggacaggctgcggactcctgtggatgagctcatgagtgttcccagggcccttcacaacgtgggatttattttccaatggctgaggttgttggctaagagctctgttggagttcaatcaggctggtgggaaaaatattagagatagttatagagatagacacaaatcttcttggaagaccaaaaagtttgcataactttggtaatagatctgactgaaggtggtccctttacctttagttaaacaaattaaagtagtaacaaaggaaggcagagtagtttgtctagccagcttgtttactcatgtgatcttaagactaaccattgatgtgccacaggtgcttaattgctttctacttgggaagtccacaatgtcaattaccctctaacggtgttgactcaagcctttgttaattaatcttactgaataaatatgagtctcactagctgatcaaggccatggtcacaactgtttataggactcagcagggagtctgtaagcggccctgacagactcagctggactggcaaagcaaaatatgtgtgtgtcagtgtacactattcacccgtcccccacagctggtgcccctatatgaggagtgctgccacagagctctgtttagtgtcccttgttttttttcttgagtattaccccaacttaaattgtgattattgtcatctgttttcaacattaactgctcagtgatgattcacttggaaaacattaacaatcgagattgtttcttcactaacaacctcagattatttagattttcctgttgtaatcccttcttcctgtttagtgtccaacagaagccctctgtccctctcaggtccccgttctctccaagaaaccccagccagtctctgtgctccctcctcccatccactcccagggagccctcccctcacctgtgagcagaagcgcctgccagggatgtgcactctgtgaggaggggctgagggaggccccatgggctctgctgtctgctttgtcctcctctgtggagaggagcttgggcttcagaaaataaggaggccagaaagtaaggaacaggctgagaaataatggggatgtgtcgaaaggtcacagatgccaacatctttgtcctatgcaatattatccataaaattacaggtttgagatatgcttaaattttcttctaacatgcattaaaataaacatataacttttaatagttatattaaattgtatttaatataaattaaatgctcttgtcagagctactgtgactgtcagctctgctgtccttcctctctctgtgctaagcctcctcccagggcagaagcacttcccagggccaggggtgggggcggggaaaggtaagtggcaatgaggatctgcacaggtagcctttccgcctcctcccctctcagtcctgcctccttgtcttcttttcctctttttctccaatctacatttcagttccttagaccacgctgtgagaagcaaggcttattgggacccccatcccttaacaggatgacctgtgctccccataagtgacctctgctgtgtctagggattggctctgtcagcacctcacagagagtccctggggcccccaaactcagtgttattttctctatgacacagaaacccctctgggtatgcaaggttttcctcatgttttctaatgtctgggaaggttggatttactcccagcagggaggtcacagagatgtccagggagtggggtcctagaaatggacaaatctagagctaaagcccaggtctacgattttcagttgtttttttctgcagtgctatgtgaccctaatttcctaggagtaactaaaatgcaaacctcagacatttgtagacattttatgatttttctctacagcttgtaccactgttattattatttgctttatgctttttcctaaataaatttactttacaaaacatccttgtcctagtagggtgcaggggctcacgtctgtgatctcagctgcttgagaggttgaggtgggtggattgcttgaggacgggaatttgagacaaaacatctttgtcctatgcaatattatccataaaattacaggtttgagatatgcttaaattttcttctaacatgtattaaaataaacatataacttttaatcatcatattaaattgtatttaatataaatttatatacaatacatttttatataataaattatatatataaatgtatatataatagtttttcttttttgagatggagtctggctctgtctcccaggctggagtgcagtggcacgatctcagctcactgcagcctccgccttctgggttcaaacgattctcctacctcagcctcccgagtagctgggattacaggcgcctgccgccacgcccagctaatttttgtacttttttagtagagatggggtttcgccatgttggccaggctggtctcaaacacctgacttcaggtgatatgccgcctcggcctcccaaagtgctgggattacaggcatgagccaccatgcctggcctatatattttatataattatataaagttttctataataaattttatataataatatataaaatggatatttatttaagataaagttattagttttatatatttacatatatttaggaataaatgtgttactgtgggagcccagtgcccaggcaggtagtcagtacatgatggttgtcattagggttaatactttggaattctggattttttcccaagagagtgtctacgctggaatattgggcttgtggctttctgctgatgtgcatgtgtgaagaagctacttccacttattaggacttgtgtatctgtctcgcagtttcactacctattttctcgtgatgttggtcaagtcgcctaacttttctgtgcctcatttacctaatttgtagaatatgggtaacagtacacaagtgtgagtgtgtatttcccaggactgaccactagagggcgtgaaggcaccggcacttactattacagcaatgggtgtagtagtgctcatggtcgtaaacatcattctcccatgaaaggaaccagggcttcctgggagaaataactgattccagggctggggccggaaagcacaagcggagcctggagcatctcgtgaggccagaaagtaaggagccggctgaaaaataatggagatctgtcgaaaggtcacagatgccaaccagaaggagctttgaatgaccaattttgagacaaaatgagcactataagaaataatgatagtaataaattccaacccataaatacccatgagttcctactaatataaataaataattgaatacataaatatataaggatgaagaaacagctttttcttacagcagaattccaattaatgaatgtagaaggaatgatcaaatagaaaatcactatttggctaacagcacagtcaattgtttgtaggcaagaattatcaatggactttaaatatgaatgggtaaaagtatgatgatgctacaactagtgagtaccaagggggaaaaaaaagtacgttgagaagaaacaggctacttccatattcccaaagtatcacttcaggagctacttattgattataatgggacaaatagtaacttacagtagagaaacctggcaacagagtctctccgaggtacaaaggctctcttcaggaaggaggtaaggggaaggaagaagaaaacactgtcctgcctcaattatttgctttccccattctcaagtgtacttcatagacattcaaagatatgtgttgatagtgtccacgatccacatggctctattatagtcatttattcacacatacattcagtgaggctttgagtgcctaatgtgtgcctgatatttgctagatggtggatgctgagaagatcaggtgtgctgctgtctctagggtgactgaatccacctgccccactttacagatgtggaaattaaagtgaaaaggatttataggattagttcactgtcacaaggtcactagccttaaagttacaggagtaaagcaagtttcctgacttgctagattttctgctgcaggtgctgacaatggtgagctccaataggagagaggacactcagagtgaagtgggagccctgaacaccctggattagccaagaggacatgccgggtccagctgtgaccgcacaaaggaccattggggatatttgtattctctttttcacttagagcttgaaatgaggaaaactaagtgcagaaaaccaagagtggaagatttttcacaaagcactggtaacatgcatcagaaaaccctgtgctgatgtctgtcacggtgtttctcactgaacggtaatagtctggctttgagtgtgttccctctacagcctggagttctgcgaggcagggaccaggtgtgattcatctttgtctctccagtgacagtacacagcaggctctgataaatatttcttacaaaataaaatggaataaaaagtagacatctgcacaggtgtgggatgactgagcagcagcagaagcaggaaaagtcagcgtccccagatcagctgatgtggtgttcggattctagataggggtgaggtgccaggatggggatgggggtcctgtggctctgctgccctgggggacacccctaggtttcacagtgcctgctgtggttgctgcactttgcttccccatgggaaagtgatcagagggtgtggggcttcaggtgaccccatgtgggaaatggccaagggaaggtggggtgggcggcacatggttttttttaaccaatatttgaaggtaggttgtatgaaaaggtgttaggcttatttcagcttatggggagtaggacagggattggtgagtgtgtatcaggtatattttggctcaggatggaaaagaactgtcacagtaacataaggtcttttgggaaattacatgtttactggcagagttcaggccagggctgggtgtctgaaaatacctgtcagggtcacttttatggttacaagggcagagcttggcttggaaccaggtttcttactaataccacatattaagtattataaaaactgtcctttgcaataggacattgctctatgatgcaggttgaggtccctctgtttaagtaattgtgggtggctgtgattctctcatctagtctgcgacttggacttcacctccatctgcagtccctctcctttgctgttgacactggtcagagttaagcgcatttactgacgatggtcacagggtggcagcactgcctctctggtattttctaaaacctcttcctggaactgagccagtctaagaggatgtcatgactaagaaaagggcactaatgaggtgaacagataattttttttttcttgtttctcctgtgaagtaacagagtggaggtgagcatggaataattgccttttagaaatggaagacaatggagagaagtgtttcgcaaaccttaatgtgttcacagatcccacacagatctttttattcaatacagattctgatttttctggtgaggcctgagattgtgcatgtctaaggagcttttggatgatgccattgctgctggttggcggaccacactttgagtagcaaggctcgaagatcatttagaggttaattctcactgcatctaatttatggatgaaaacaaaccaaggtccagagagagcatatacagcttgcctaacaaagccattccctaagtgcctgacttcttgcatttaaacccagggcttcagcctttgtccagttctcactccacacatcacacggtttgttcactgttgtgaacgacagttgtggcagcatctctttagtttaggaatccagagccccaatttcactaccctctttggtcttggctcatgctgtgacttcgaatagttttgcccttacttaaaatcttcagtggctcttttgtaatcacaagatcaagttcgaatatctctgtctagtgttcatggctttataacatatggtatctctttagtaaccttacctaacttccctgttttaaaattgtctcttgctgccatagccctccttgctccttcctgctccctaacaaactgtgttcacttctctctcagtggtagtgatgatggcatggcctctgatgttagactcatgtaacttctaatcccagatccaccaccaacattggcaagttgattcatctttctgaggataagcatcctcctctgaaataaacttagatggcggttgagaggggtaaataaaataacacacaaacccactctcatccctgagaccctcttcaaaactagcatataaaaatagctatttgaagaggttcagtgaaattcaaggtaacacagagaaggaattcagaatcctatcagataaatttaatagactgaaataatttttaaaaatcaggcagaaattctgtagctgaaaaattcaattgacaaaccgaagaatgcactaaatctttcaacagcagaattgatcaagcagaagaaagaatttgtgagcttgaagagataatatatgaaaactcagagtcagagagacaaaagaaaaaagaattaaaagaataatgcatgcctacaaggtttgattattaagctactcaaagagatacaagagaagggtgaaaaccaacataaagaaatgtaaaaaacaatcagaatataaatgaaaaattttctaaaatgctagctagtttttttttgagacaggctcttactctcatcacccatgctggagtgaagtggcacagtcatggctcactgcaggctcaacttcctgggctcagatgattctcccacattagccttccaagtagctaggactaaaggcgtgtgccaccaggccaggctaattttttgtatttttagtagagatggggttttgccatcttacccagggctggtcttgaactcctgggctcaagtgatccaggagattcactgccaaaaaggatataaccaagtcatatagtcataggttatctaaagtcaatgtgaaggcaagaattctaagagcagtgagacaaaagcatcaattaacttataaaggaaaacctatcagtctaacaccagatttctcatcagaaaccttacaaaccagaaggtattggggtcctaatcttttggcttcttaaacagaatagctctcagccaagaatcttgtgtagagtgaaattatatttcaaaatgaaagagagaaatacagtctttttcaggcaagcaaatgcttcaggatttgtcacggctagaccatcctacatggaatgttaaagggacttctaaatcacaaaacaaaagatttaaatagaacagaatagaacctcttgaaaccaaaaaattcaaatggcctataaaacaataacacaataagaaaacaaagtagataacgatcaacatgatgactggaacaaatattaacattgaatgtaaatgacctaacactccacttaaaagacacagattggcaagataaataaaaaatcacaaaccaaatatcagctgtcttcaagagactcacttaacatgtaaggattcttatagactcaaggtaaagagatgataaaagatattccatgcaaatggaaaccataagtgagaaggaatagctatccttatatcatataaaacagactttaagcaacaacagtaagaaaaagacaaataaggcaactatataatgataaaaggatcaatcaaacaagaagatattacaatcctaaatatatatgcacctaactttggagctcccacattcataaaacggttatgatgagacctaagaaaaaagatcaacacaaaacagtgagggtgtcctgggttttctttttattggacagcagtgtactagcctatcactttcccagtcaggggatttttggtctccccattcccctaccatgggttcatgccaaagtccatattttttattagtgtttggaattggattttttttttttgaggtggagtctcgctctgttgcctaggctggagtgtagtggcacgatctcggctcactaacctctgcctcctgggttcaagcaattcttctgcctcagcctcctgagtacctgggactacaggtgcatgccaccacacccagctaatttttgtatttttagtagaaacgagatttcaccatattgtccaggcttgtatagaactcctgacctcatgtgacagggaaacaggcactcagtgaacttcatgcgattgaggagttaatgataatgagagaagggctgtgaggggacagcactggggacaccagagcctgtgacgggctgagttgctgtgccttgggagatgcccttttgactgagccctgggaaggagggggtgtgggggcaggagctgcctgcagagggagtggcctcaggtgggcggccacctggctgcagggaagaggtgacagagttcgtgtgcagagcttggagggtgaggaggaggtgggttgaggtgaccttggtgagggtgaaccatggggggctgtgggccctgctgagggaggccagccagccctggacctacagggtggtttggtcttttttgtcccattcccagcatccactgagtggtgaaactctgcaggccagggaccatcccactggccagaaggagcgcacagtaggtgcccactcagtgcatgttgggctggacagaacctcactctgccccctgcccccagctttgggagctgcagcaaggtccctccccctagggatctccatgcctctgtctctgaggggtgagatggggagacttcaaagggccatctcagagtgtgggggatagagacgcagaagtgtgggggatagagggaggcctgggctctagacccaaaggaccttacacacctcctgagtcttttcaaatggtttcttctgttactttaaaaatgatgtaagtcatcatatttattgtaaatcccaggaatctaatcatgcgtaaaataaggtgtcttatccttgaccccaccccttccccaattaaatttccaggatgttaccactgtttgcagttggtgtgaatctctctttaataatactctgtttatctcacttgtcgttttacgccaaaatacccattgaattatattattgctgaagaccattcttttttttttttttttttttgagatggattcttgctctgttgcccaggctggagtgcaatggtgtgatctcggctcactgcaacctctgcctcctgggttcaagtgattctcctgcctcagcctcctgagtttctgggattacaggtgcacaccaccacacctggctaatttttgtatttttagtaaagacagggtttcaccatgttggtcaggctggtctcgaactcctgacctcatgatccaccctccttggcctcccaaaatgctgggattacaggcatgagccaccacacctgcccagaccattctgttctactgaatcatgtgtggtgggcacctcttatatcaatacatatggattttatcttgtgtttgttattggctcccctttttctcattgcatggctacactcaatgctttgtccacacccctgttcctgggttggaatcttgtgacagaaaatgaagtaacaaaggctaaagctttctaaagtggagtcaggagattgcaagacaattgcactttcaccagcaagagctcaaaccacagaatgttccaatagatttggataaacagctgaagtcagtattcaccagccttcaacatctcaactaggagaaccctaaaattaactaagcacatagaatggaatggacttgtgatttaggattccttctcagccaatgagctgcttctgaaaacaactttttgtggaaattacctgtaaagaaaaccctctcctgtgcttgtcttacagaacactagtcagggctgccctgattcagtggacccgaattgctattatttgtttcctaaacatatggtattttctgtgaccttcatctcaatcttttttttaagttactgggctgtttcccagttttcataatgacgagacattctgcagtgtttcatacacatgtcttttccccatgtggagtattgatccaggagctcattcagtcaacgcatgtttatgaagcatcctgtgccaggctgtgggctggtcactgtcttcagcagagagaggacaggcacagtcttgccttcacagagctcacagctcagggaggctcttagaagtgggatactggtcggagcatgtgcacattaaacatgatgaggtcaaggttgctatagggactaaaccacagtcccaccaagatcgcattgagttcctgtggtagaccagaggtcagggcccctaagatgtcctgagcagctccctctgctcagaagttttggttccacaggtgacacacctgagcacaggtgacccctgcagaacctgtgattaccacccaaagccaagagtgagtggtgggtgttctaggaggaaccgtcacctccatgggcagggttggggaagactgaggggagcaggtggctgatgactttggccagaaggtagggggatgggcaggtgtgcgctcatagggaagggaagagaagggagggcattgcaggcaacaacacaaaggttggaacctgccttcatggactgagaaaagcagggagtccacccaggctgcagctggggagggaagacatggggagcagtgggtctaggggagaagcagactgcgattgaccttggggactgggcagtgagcagaggtgtgttatgtgtgtctgtccccatcatagatatgaggaggggtgaggccgcgggtggcacctgggtcggtgggatttcatagtgcctgctgttccctagagcctctctgtatagagggtcagaatagatctgaggctgtggtctgggggaaggggctggtggtgcttaccatctctaggggtgggaggagagggatgaggatgcccctgagcagtgaagcctcaaggtgtgtggagccacagttgtctctcattagacatgtgttttgcgtgaggatgccagggcctggtggttattactgttgtcaagtttgcatgacaaggacccaggtatccagggatccagagcacagggcccctggtgaggggatgaggctcagatggggctgaccaggttcatgtggtcagagtgggagggactgatggagagacagagcctcaacccctcctgtcaggagctgtggctatgtccaggagagatgacaaggatgacccaggacattgagtgagtcattgagacattgaaggtgaggacagggcagagaggaccctggtgactgctgaaatgtaggatgtgaggagggctctgacccatgcaagttacaggacctccccacccccgagcccacagatgacccttaaattgggcatcctgagtgctgtgtgtgcccagcagggacactggataggctggacctgagtctctgtaagggcagcgctggtctgtaggaccagagtcttctctgtgggtgtgacgtgggcaggaattagcaagatgggggtgacaaggcttggcttggaggatctggtacagaagcccatgggcttggtcagctcagcttctcaggggctcagctggggctggaggagcaggatgctgtgctcagggcatgctccaggcagcgtgatgtgtgtggttccagggtcaggcacgggggtcaaaaattaaccatgaaaagttcccaccttctgtaggcagagaaaatggcctgattgtcagggtcagggagacttaccatgtggccaaagcaggctctcagcctcccagagaccacaccctgggtgcagcactcagctctgcagggtatggcaatagatgtgccaagaaccccaacatccagatgcatgcaaaaattttgcgatatataaaatagagcagatcaagtttccctgcaataacgttgttcctggttgtgtctttttcttgtaaactagacatggacatctttccagcagtctgttctcatctgccaccttcctgctgcagcacctcagaatgaacattcctgagacactgtccgtggtgctgacgaccaagagctatggaacagagtgtgatgtagaatcttctagttacctctgctctcctttcacttttaacaacagagcatcattaacaatgagaaggtggagaggtgttcaggatcttgaagtgacttctgtcttgctctcccataaccctgaagctgctgtagacattattgcagaaactgacaccacagtcaggatggccttgtccaggagcccatgtgcagtttgtagtgagcaaggatgagaaaatggtcttgaaaggggtgatggacagaacaggggcttttcaaaaatgtcacatcatcacccccagcatccgtgaatctgtcacatggtaagagaccttacagattaaatgaaggattatgagtttggaagattattgtagtttatccagatgggtccaacataatcacagaatcccttccttacaaatgagagagggaggtgggagagtcagagaaggaggaggagatgtggggatagatgcagaagacagagcggtgtcaagatgctgcactgctggctttgaagatggagaaagaggacacagccaaggatgcaggaggcctctaggaggtggaaaaggagaggaaacgcactctgccctggagcctccagaaagaacgcagccatgtgggcaccttggttcaagtttctgtgtcacttagcttgtgggaatttgtcacagcctcaacaggaacctacagaggagtcaccttgtgtgcaggtgggatccagggtcatttacagctaaatcctgatgtaaatattgcaggttgcttttcctacttcctatctcatggccaacaaccctggacaatggcagaacacccttggaaaccacggctctgtgctttagtggagggaccagcttgtttgtgggaaggtagcacctggtccaagtgaacctacatgagatcgttactctccccagggccctcagggaagggctgagaacagctggcccaggtgtgtggaggagctgcaggtgaggcagggctggaggggcctgtgggtccaggtagaggggcagacaggttgtcccatcgccatgggagcctgcacgagctttaggttggggaaccctgctcctctgacctggacgctcctgtgtggagaggaggcttgctcagtgagatccacgccagggggtaaattgggaactgatgggaaatgaggggctagagtcctgggtagtgcctgggaggaccttgctcaaggactgaattcttggtctgttcccaccttggttactctgacaacccctctctgtgtcccacggggataaagatctcctgagcagtggccattgggacagaggagaacctggtggccagagctaagcatccaggatcctggatttggggacaggcaagctcattgctgggggacagtgatagatacggcctccagggcctgggtgaagagagcaggagggctcaggacactggaggctgtgtggaggtcacacccacgatctgtaccacccatggatgctcctgcattgctcacctttgtgtggacatcagatggccccaacttttgcactcctgagacatctcatgcattcacagagggacccaggctggggctgtgcatggccttggtctctagggtagtgtgaggacagctgagcactcagctggctgggcaggactcctgcgaatcctgccctttcctgtgtagggtccaccccagcctgactcctaaccccctactcctgtctttccagggaagagagactggggttgagataaggtggagatatttttcctgtgtgacccaggagagaatggacatggagtttcaggtgagtttctgctaagttcccatgagcagaaaaagagccaatgagaggaagtttcccctttattcagatcctttccaggtgaccccgggtgggccataggcccattcactttccctgcaagcccccgcttcctgtggtgatgggaagccttcgccttggcccacccagagcccggggcagtctgttgaggtctctatatattcagcagggacccccatcccttcctgtccccaggcctgtgtctcctcaggactcagagctggttctctggctcaggctccatgtccttccccatccccagggctgggggcttcagggacgctccatcaacccacaggagcagctcccagaggaacctaagaagccacatctgctttgtggtcgatccagcagtaaatgtttgtgtcagagtgtagcaattccagtaaaaacagagaagaggtcttgacccctgaggccttctcagaacagggtctggcatctctctctgggcccacccagggctactctgggactgaacctggctgtgctcagggggttcctgctcccaggcccctccctcctctgctcaccacctcctgttattttcactgcagtttcctgaacttcagctcagccagatgccagtggggacagatcctgggtctccctggggcccaagggaccagaatatctgtggcccccactcacctcatagatgagagcagctgccctggtgctgggtaggggaatctgggcaggggagagaggggtgtcaggggacagggaaggattcctgctgtgtaggaattccagggctctcctcaggtgatggagggtcccagggtggggttagcacagggagtggatgatcctggccctgaacagaggcccagctcatggccagggcaggtctaaccttatccaagtcattctgggtagggtgggtttgtgctggggattgacagtccccctgccctgagcctgcacagctggggccccagtggaaatgggattgggaacggacagtcttacctaggagatggagctgtcagagggtccatggcctggggacagagacaaaagtgagcacgagagtgttaggatagctgggcccctcctgcaagagtgtgtgggggtcctcagttcttagagaattggggagagggagcctttctcaggttattttaggggtcaagtaagcaagtgaggttgaggaagtgacccatgacccagagcccggaggttagggctgacccggccagttggggtttcctgtgtgatgttttatgggatcctctttgcagccccagggatagggtcagaggcccctgggtgtaactggcaggagtggacaacttggggctggcttagtagttcccagccacacccagactgaagggacactcaccgggggtggaggctgggggctgctgctccctgaagtcactctgatcgctggccctaggaaaggtcagggttatttgtgaaggtgcaaggttaaaagtcacaaattggagttaaaataggggaccaggaaaggagcctatttccaagaggggtatggagacctcctttctttatggagttctgtggtaggaggggcccaggtgaggggagttgaggaaaggccttacaaagccacatctgtcctggccagaggggaaggactctcaggcagatgctgggccaggagaacattgatccagtgacacaggaaagggactgaggacccagggaaggaatcagaccaccaggggttgcctgagaggaagggtcaaggcaccagggggaaagcagggccaggcacatgtgcaggacactgaggggactgcatgcatcttggattctcctggaactcagtgtccctgctgtgaccagacactccactcagggctggagatgctgaaatgggacaatgatcttgtcttctgtctctgccctttggcaagagacataaacgacattccaggatatgccatattggggccccggttctcccttctcacagctcagtgtctgcagttaccatgtcagtcaaaggggtgctgaccccacccagcccgtccaggctgttccagtctccactatgtgataatgcccaggatcccccctcagatgccctctcactgggtggatggattcagtgaacagggggaggtaccaggtattgagcaccgctcccccctgctccaggcagctgtggctttgctgtgctaggaaactaggaccatgctcaggggcatggccttaattggactgaattcactgaggacaaagctgttgaggaagcagcccagggtcagcagctggtgaggaaggtgccatggaatgagagggaaggatccctggggagtcgggaggctggggagagcctggcactgaatacaagacagggtctccttccttctcgcctggggtcagcgtgaaggatgggagcagaatggggaaaagctgtggtacctgccagtttttcggaggagcaggaaacacacaagtgcagccaccagaagactcccaaccaggaccccgatcaggatgcctagagtgttgtcatctgctgaaagaagaaggcaaaggggatgaggtccaaatctgttccagggggaaccatgaggggccttgcagggcaggggcatggtcagggaggaaggaaatgccatggagcctgagtgtggtctgttgtgctgtcctcatagctggctcccttgctctccgtggttgcaccattttctgtgtcttaggcttgaattactgggatgcatcaactcctacattctcccacaggaagcctgcacctcatcctgctcctgtgttttttagtccctccttcctctcacatcactcctcttccccctgtttctttttttccatcccatggcagtcgtaaagggcaggcccttgctgccaactcaatgctgatgagcagggatgatgttcattgactgttttcaggggccttccacatggaaggcacagtgggaatcaatctacctgcagcttttctcaccctcccattgccttgagggagaagggtatgtgatattgtgaaatacgtatttggtgttcatcaccattgatatggttaggctctgtatccccacccaaatctcaccttgaattgtaataatccccatgtgttatgggagggaccttgtgggaggtaattgaatcatgagggtgggttttttccatcctgttcttgtgatagtgaataagtctcaggagatcagatggtttcataaagggaagcttccctacacatgtcctcttgcctgctgccatgtaagacatgcctttcaccttccatcatgattgtgagacctctccagccatgtggaattgtgaatcaattaaacctctttcttcatacattaccaagtctcaggtatgtcttcattagcagtgtgagaatggactaatacagtaaattggtaccagctagtggagtgctgctataaagatacctgaaaatgtggaagtgactttggaactgggtaacaggcagaggttggaacagtttggagggctcagaagaagacacaggaaaaaagtttgaaacttcctagagacttgttgaatggttttgattaaaacgctgatagtgatatggacaataaagtccaagctgaggtggtctcagacagagatgaggaacttcttgggaactggaacaaaggtgactcttgttatactctagaaaagagattggtggtattttgcccctgccctagagatctgcagaactttgaacttgagggaaatgatttagggcaactggtggaaaaaaaattctaagcagcaaagtgttcaagatgtgacttgggtactgttaaaaacactcagttttatgtatttacaaaggtatggtttggaattggaacttatgtttaaaagggaagcagagcataaaagtttggaaaatttgcagcctgatgatgcaatagaaaagaaaaatccattttctgaggagaaattcaagccagctgcagaaatgtgcataaacaatgaagagcaaaatgttaatccccaagacaatggcaaaaatgtctccagggcatgtcagagaccttcctggaagccccttccatcacaggactggaggcctaggaggaaaaaatgtttcctgggccaggcccagggctcccctgctgtgtgcggcctagagacttggtgccctgcatcccagccactccagccatggctaaagagggccaaggtacagctggggccatggcttcagagggtgcaagccccaaaccttggcagcttccatgtggtgttgagcctgcaggtgcacagaagtcaaggattgaggtttgggaaccttcgcctagatttcagaggatgtatgaaaatgcttggatgtccaggtgaaagtttgctgcagaagcagagccctcatggagaacctctgctagggaagtgttgaagggaaatgtggggttggaaccccgacacagagtccctactggggcactgcctaatggagctgtgagaagaagaccacaatcctccagaccccagaatggtagatccactaacagcttgcaccatgcacctagaaaagctgcagacactcaacgccagcctatgaaagcagccaggagtggggctgtaccctgcaaagccacaggggtggagcccaaggctatgggagttcagctcttgcatcagtgtgacctggatgtgagacatggatacaaaggagatcatttcagagcattaagatttggctgccctgctggattttgggcttgcatggggcctgtagcccctttgttttggccagtttctcccatttggaatgggtgtatttacccagtgcctgtacacccattatatctaggaagtaactaagcttgcttttgattttacaggcttataggtggaagggacttgccttgtctcagatgaaactttggacttggacttttgggttaatgctggaatgagttaagactttggggaactgttggaaggcatgattagttttgaaatgtgaggacatgagatttgggaggggtcgggtggaatgacatggtttggctcttcttcacccaaatatcaccttgaattttaataatccccacgtgttgggggaaggacccagtgggaggtaactgaatcatgggggtggattcttcccatgctgttctcatgatagtgaataagtctcacaagatctgatggttttagaaaggggagttcctctacacatgccctcttgcctgccgccatgtaagacatgccttttgccttctgccatgatttcaaggcctccccagctatgtggaactgtaagtcaattaaacctcatttttaaaaaaattacccagtctcaggtatgtctttatcagcagccaagaccagctcggtcgcggagatcctaacccagcagtgctagaggaattaaagacacacatagaaatatagaggtgtgaagtgggaaatcagggttctcacaggcttcagagctgagagccccaaacagagatttacccacatatttaataacagcaaaccagtcattagcattgtttctatagatattaaattaactaaaagtatcccttatgggaaaccaagggatgggccgaattaaaggaataggttgggctagttaactgcaacaggaacacgcccttaagatgcagattgctcatgctattgtttgtggcttaagaacgcctttaagcggttttccaccctgggtgggacaggtattccttgccctcattcctgtaaacccataaccttccagcttgggcattagggccattatgaacatgttacagtgctgcagagattttgtttatgaccagttttggggccagtttatggccagattttggggggcttgctcccaacagactaatacacccattttctggtatgtgactctaaagtccttagaatcttcaaagtgatgtctttttcaagctaataattgactgatgactggcagcccctaggcaacttcagaatgaggctggtcactgacccaggtaggattagagggttgggactttcagcctcacccctaatccctggggagggacctggagtttgaattaatcaccaatgaccaatgaatcaattaatggccaatgattgaatcaattaatggccaatgattaaatcaatcatatctatgtcatgaaccccaaaaggactgggtttgaagagctgaacccatggaagtttctggagtgtggtgcatctggggagggcatggaagctccacaccccttcccacatgccatgctctgtgcatctcttcatctgcatcctttgtaaagtcctttattacaaaccggtaagcctaagtatgtgtttccctgagtcctgagagctgtttgagcaaactaatccaacccaaacagggagtcatggaaacctcaatgtgaagccagtcataagaagctctggaggcccagacttgtgactggtgggaaggtggtggcaattttgtgggactgagccctctgctgatatgtccaggtagatagtgtcaggatggaattggaggacacctagctgatgtacggtgcagaactgattggctgctgggtgtgtgggagaaacccccccgcatcacatttggtcacagaagtgtgtctgtgttgatgattgttattgtggagtgagagcagaggaaaaacacagtttgagtttttccaaacagggtggaatcccatctgccaatttagaatctgaaacttatagtttcagtacttcaattaagattgaagtacttcaattcagtacttcaattaagattcagtacttcaattaagattcagtacttcaattaagattacagaactggtaagtgaaagtgatacaacaaaaatgtaaccaaagtctgctcaacttaacagctaataacaacaaagttcataaaaataataccagtcgatattgatagcactgattgagccctggctctgtgcatgaccttgttaagggctttaatcgcattaatctctgaataaatatcctcacaaccaccctgagatccaggtgtttgtaacaattctacagatgaggaaactgaggcccaggaggttgagtgtcttgcccaaggtcaaatacctggtacctattgtaaccaggatgataactggatgagtctaatccctgagttcttacccacattgctccccaggctctgaaggaatctcatccttctcattccgtgtatcattttacaccccccctccctcctaggaaaatatacaaggaaaggagtgagaggggccgagggtcactcacattttacagtcagcttgagggggtcgctcctgttggagctgactgggttggagacctcacactgatactccccagcgtcctcctgcctgatggggtctatggtgagcatatggttaaaccaggacagcttcatcctcttcgtgacctgcagacgctggttgttgaaaatccactggaaagaggttccagtgttatttgtgtggcaggtcaggaccacggagcccttctctgtgactgtggtgctgctggcttggatggagggctgagccactgactctgtggatagagtgaccaacagaaagtgtcttggggccatgctgcatcctcagagatctcagagtcaaatttagaacattctcctgtgaataaaggagaaagatgaaggacagggaggagcagagagaaccagagacacccatagcagcgagcagtagggactacagtgacctcagagaccccagggaccaggaggacccagctgcctcagaccaggaccagggagccctgaaaaccctcccacagatgagcggccccagagtcacatgagatgcaatacctggggtggctttaggagcaggcagtcagagaaatggaacatgggtctcagcccctaagggacaaggaagaggtgtggccagctcctcctaggatcctacatccaggacccagtctgtaaagaggttatgattattcctttcttttttcattaattccctccctccttcatcagagaactactgagtgtgtgtctcagttgggccttgtgcaggtacagggtgtagtgggaagagaaagctgagtcctttccttcatcctcccatgggagtgacatcaacaaatcaagaaattcatgatttcacgtccagtgagggaagaaatgtggatctgatgggagaggcttggacaatcctggcattgagtctgatagttgagacaggtgatttcgttctaagtaaaaactgactaattctccatttgcccgtcattcctcagaccagaatctccctctctgagctgaggatgcccaagaagaaaggagctgaaccaacatctggtcctggggtccacagatgccccacggtggtggccacgaccagattctgggctgcagacacacggtggtgtgacgttgagcactgacagcctgtgtgatgctgatgcaatttctctttaataaaatggggtaaatgtcaatggtccctggcttgccatcctctctgtaaattaacattaaaatatttacaattacctgacctaaagcttggcacagaatagctccaaataaacatcatctattattattttactccaaaaaaaaaaaaaaaagagttctctgggcctgattcctggtggagaaggagcggtccagagtgtcttttctctgctttccctcctcctgaggacagtgcacttcccgggacatcttttaagtttcccatccagtttaatggcctgggaagtttgtttgtctgtcctctccactctgactctcaggtgaaagatgaggctctgcccttgcccagatggggctctgggggctgagccctgcctggtgaccagctctaggaaccacggccctgggacagctggtaaatcgttgctcacaatcagccctgcccaggaagccacaacccagccctggcacaggctccccagggtcatctggagtcaggatcttgggacaggggcctggggcaggggcttgaagggctgagcttctctcagaggatcctcaggccaggccctgactgagtcctataagatctttctcaggtcatgtctatgaggaggaggccaagcggggttggactgagactgattttcccccgctgcatctcccgcatcagactatccttcttgctgtagggaatttccacggagtccggataagggaaaggaattctgatctgttatagtttgtctcccctgggtgtgtcctgcactaaatgcccaaaccccaacatgggacgtaatgcagagggggatgcaggcacagcccaggcctgacaatcctgcgtatgtgaagcagaactgacccccaacacccagaggcacggaggaatcactcaccgtatacacggagatggtgagatgcctgttcaatctgagaatttctgtatgtgacttgtagggtgtagtatcccgtgtcctctagggtgacgttctggaaatgcagatctccactgggtgatattgtctctcgaccgctgtatgcaggccctggagtcctaacgtgagtgtctattacatatgctgcgattagctggttgggctccaccgttttccctttgtaccagccatagctgtaaagattctcgggcagataaaccacagagagatgaacattctccccttcagcaacttcaaagggcgctgatgcaataaagagccaggcagtggtgggtgcgttccagaaagttaaaagtgaggctaggaaagggagagaatatcagtcaatatttgacctatgcattggcatggaaagacggggtcctgggtgcaggtctcttcacccctcagccttagagggtgtgtgtgtgtgtgtgtgtcctactgggtcaaagtcagcagcatgaccctcattccttcagtacctctgaccttggcatttccttgtgtgaaccctctttcccaggggtctgcatggttccctccccactgccttcagttcctactcacacaagggaatccctgggagacttctttcgtgaagcctcctctagagaccctgggtcttccctttctgacctttcccagctctgttccctccagggctcttgtcagcacctgacctcacattctagatctctttgggtgtctgtcttcccccccatgagattgtgagctctgtgagggcatggacttgagtgatgttagttgcaccccagtgcctgggacaggctgcagactcctgtggatgagttcatgagcgttcccagggccttccatatcctggggtttatttgctaatgtctgaggttggcagatgaagacagagtttcatgccctggtggtgtttttatttaaattgtcactgtgatatagttttactatcattttcaaaatgtagtggccactgacaatgaacttgaaaacatggaccaactgagattgttttgccccttggcaattccagttcacttagattttttggttctccttagacgctctctcccctgagtctctaacaaaagccctctgtctcctctcagagccccatcctccccaggagaccccagccagtctctgtgctccctcctcccacccactcccagggagtcctcccctcacctgtgagcaagagcccctgccaggggatgcattctctgtggggacaagctgaggggggccccatggtctctgctgcctgctctgtcctcctctgtggagaggagcttgggctccaggaacgctctagacagggttactgtgactgttgtctctgctgtccttccttcctctatgctgagcttcctctcaggcaggagcacttcccgtttatgggcaagggcggggctctgcctacaatgtctctctgtcccctcccctctcagtcctgcctcccttgtccctcctttctccttcctttttgcctatatttggttccctaggcaaaactttgagaagcaacgctgatggggtcctcataacaggacgacccactctccccagtactgacctctgctgtgttctggccttggttctgtcacagccggtagattatttccctttgtgacacacaaaaccagctgggccctgggtctcctcatgctctccagtgctccaggaaggcagaatgatgcccagcaggaaagtgacagaggtggctctgggggctagaaaggggctcactgggtgatggctgggaaggacccacccgctatcttcagtgtcaccagcctggcctctgacccagggacagagacccaggcctggaggtctcgggaggatccccagctcctaggtgtggagggaggtgtcctgtgtgtcctgggaagagaggactttgatggaaggaggtgggaggctctgggttctgctgtccttggtgaaggtttcagggggaccctctccatgtctggggtctgtgcccccagcttaactctcattctctttgcaaatacatatattttgtggatctgcagttgcctgaactgtctcatgtccctaaatctttgtatccctttttacagaaggtcaggaagggtgtgtacatgagtatgaggactatctgatcagggcgagtgtttgtttcccaaagatctctttagatatggtataatacataagataaatgtactgaattagcaattttaagtgtagaattaaatgatactaattctattcacaatgttgtacaaccatcaccataattttttaccagaaaatcttcattataccaaatggaaacttcatacttttaatcaataactccccacttccccctgccccacccactggtagcctctgatactatcaatctctgtgaatttgcctagtttacatgtctcatataataaggaattatatacgtgtattatttttttctggattatttctcttagggtaacacttttaagattcatccacgtcgtagcatatattacagcttctttcctatttatggctgagtaatatcccaatatatgtttatacctcaattttaattcattcatctcttaatggacatgtgggtggtttccacatttttgctattgtgaaaaccgctgcaatgaacttacacttggaagtatctgtttgggtttctgtgttcatttctttgggggtacatataggagtataaatatggggtcatgtggtagttctatgtttaagtttttgagaaacagccaaactgttttccagtttgctgtgctattttatattcccatcagcaatatacgagggttccattttctctacattcttgtaaacacttactatttaatattttttaaaacttatagccattctagtaggtgtgaagtgatagctcattgcagttttgattttcatttccctggtggctgatgaagttgagcattttttcatgtatttactgacaattttaatattttttagagaactatttattcaaatcatttgctgtttaaaaaaaatgggttatctttttattattcagttgtaatagttctttatatattttagatacaagtcccttatggggtacatgatttgcaaaatttttctcatattctgtgtcttctcactttcttcatggtgttctttgaagcacaaacatttttaactttgatgaagttcacttatctatttttaattttgttacttatgctcttgatgtcatattgaagaaaccattgcccaatccaagatcattaagttttactcctatatgttcttctaatggtttgataagttttgctattccatttaggtttttgaaacattttgagttaacttttgtatgggctgtgaggtaggggtctaactacactatctcgcatgtggttatccagttgttccagcacaatatgaagaggctaccattctttccccattgaggaatcttggcacccatgtcaaaaaccaatgggctgtaatggtgagggtttatttctggactcttgattctattccattgatctctatgtgcattcttgtgccagaagcacactgttttaatgattgtagtgttttagtaagttttcaaattaggaagtgagtcctccaatttttttttccagattgttttggccattctggggtgacttttaaaaaagatgtagttcaatggttctcaaagcaggagtggttcagctctccttttttggcagtctggagacctttttaggaccttaatctaagtagataaattattcccactttcttttctgagttgctatgttacagtgtatattgacacccatgaaataattgagagaccctggaagtgcttgcctacatagtgagggacaattagttccatgatcatgggcacagaagattttgttttgggaaacaattttgttggtggagttatattcatgcttactcttttatttgtcttcatagcctgcatctccttcagacttcatatctgtttattttcttgtttgtcctctggggtttgggtgttgggtgaccagtcagctggagctggaggaggtgcttagcaaggcagtgaccctggttgggaggagcagggctcagcagggtgaaagtagctgggccttgagtcaggagtggcatctggaaggcctgactgtaagggtcagaagggccagcaggtgggtgtcctaggcacaaacggtggctgctgctgtggactggaggaaggtaagaggccccgagtattccatgttcttactggctccccaactgaggattcctctcctgggctggtgctgtcctgcagcagggaggggttagacagggacggctgcacatcaggccggagtccatgtcatcctcttaggcactgtcactacagattgaggattctgttcataagccaagcctttgcacaaggaagggacccgggctctcaaggaagagcagctcctggtcagacctccatctccttctctctcattgcctgaggcctcaagcttggtctacctggcacaggggtctggatcctcctcccagggttggggtcttactgagctgggcacctgcaggtgggagaagatctggaggggccccatctgccttcaccagattgatgttgagggtccctgagtcctgcaccactatcaggtgctgagcaacttccagtgtcagtgacaaccaccccatggtggaagcagaaccacctcgtgagaaagcacctccaagcctcagtgcttgccatgtgtgggaatttgctggtttcagttgggggcatgttggtgggtggtcatgaattcagggccggattctatgctcacagtgcacatgctggatgtggtacagaccccaggcagggctcagtggggtggttttgggtgtgcacaggtatcttttctggaggagctggtggtgatttggctcccagaagttcctgagctctgcagactcaccaagcactcaatatttgagtgaacattgggcgagagagcagaaggtaagtgtcagggcatcggggttggtgcctctgggaagaggaggaacattctgggaacaaagctctcccccggcttacagggagcttcccatcgctcctgccttgaggatcagggaaactagggcctctgctcttccaggggctgcttgcaggcagtttgctctgggagggggtgacccaggagttgcctctcattttgcatttgagatttaaaaggagaagggacagtatatcttgccaggtcacaaaaattacaggcatcatattgactgaagggcactcctgtcatcactgcaatataccagaatggtcttttaaaaaaataagtgatttaggtttaccagcaactgtaatgcttgttttattcttctagttcaccgttaatgtcacttttgtagttttagcactggcaatgttgattttatgttgactctgatgattttaagctttcatttgttcacatagagatcatcttctttctgaatattaatgcattttttctctatttctactggttattcctgtacatagagtagagaatcacttttcccaaggaggtggaaagcttctgactaccaaaaaaaaaaaaaagtgtcaaaatgctttaaagtcagtaacttaaagatcaaatccaagagtgggcaacagattctgcccagggtctgaaaggtggagaggtgactggtgaggatgtttaaaagacctctcctctctactccctaaatgggggccatccagtgttcttgaggttcagagaaggcccagggctggggcagcagggcactgtcagctcccagctcccaggggccaggagtaagaccccaacactgtccagacactgattgcattcattttgggggagagtagattcttatttaaagaataatacaaaagtctacaaatatgaacataaacagaaattcctttgctacaattttccccttaataagacattccttcctaatgacatatgtgactgcattcatggctgagatgttttctaggatggtgagagcatcagagtggactatctggtgccttggggtcatgcattttcttcttccaatgtctacaggatcccccatgtcccactttgtagtgtaactcagtgtgtgtcattctggtttttgttgtatagatccttggaaagcccatgtcattcctgctgtgaggtacaggcagccaaatggcatcatctctaaacatgccttctcctggtacatcaaattatggaataaatgaaagccattttgacagatattgaagatataagtttctactcttcccacacatgcttctcccaagtgaaggattttactggtgaattgttattagagattagtgtggatcagtgactctgccaggggaaattttgccctctaggggacatttggcaaagtctggaaacattgttggttgtcagagctgggggagggagtcctgctggcattgagtgggtggatggtgctgaacaccctgcagttcacagagccccaccagtttgaccacccaaatgtcaatgctgaggagtggagagccctgctgtgccctcccgcagcttccctgaagcttcccctcacctgctcctcccatgtctccccaccacttccccacttcacccgcctccttacacctcagtcccctccacctgaactcaccccttagtccaaggccagccctgatctccgctctcctggtctccttgctccttagcaggaggcgcccactagatggcgcccttgcccttactggagctcaccgtctccctttccaccctgagacaaatgtggctgcttttactgccacaaccccagccctccacactctagatttgctcagggagcagctcctggacagacctcagggaccccagggaggagcctcactctggagattttgatggcatggtctttgaacttcactgttacccccagtcaggatccaggatgttgggagtgcatgattctgcccggtcccacttcagcaggaccccactgctgagttgtctgtggggacccgggcctctcatctccttcttgcattgcaggagagggatcttagcactgctttcacataaagtcagataatggaggagtgcaggtgagtttgggaaggtggacatgaagagaggttgtgtccctagaggtggcagcagtgagaggatgggcaggtgggaggaacacagcccatccagggttgccagccatattaggagcgacagcctttcctctaagcctccagcctttttcctgaaacattccagaactttccacttcagcacttcccactgaggctcctcaggtctgtccctgagctcccagctgagcctacctacccatctgaaatcctgagtcctgtgtcaccctcgttccccattattctgtgcagttctgtgggacgcccagctctcctgacacccccagtcttcagaatggccatcagcgctgtcgctgtggcaccagggtgactgccgcctggaggctgagtcctggcttcctgacagctgtggggcccgctctaggctcccttgtcctgatcattcatcacctccaggatgcacagcagctgggccagggggaggagcagggacaggtgtcagccaccctgtgtgtctgcaagtcaggctgggggtgtgggaggacgccaggaatgactgaactttctgatttagagggtgagagcttgcactgatggaatttgggatttaataggaaaagcatagcgttttcctattttgtaggcagggtggctggagtttggaatcatagattcccctgggatgtcactgtggacctcagtcccacccgttaggggcacagatttcagaatccacaccctggggcaaagcaggcatgggaggctccatcagcctggccagggctctctatttgtgcagctgctgcaaggagatgtgcactctgatgggaacagtgctccctcctccttggggggcagtatctagctccctgcagcccctctccctgcaggccctgccctctctgaacctcaccttccccaacccgccccccgcaatcccatctcagctgtaatcccaacactttctcatccattatgggtggactgcttgagcccaggggttcaagactatgctggctggacaatatagcgagttgttgtctctacaaaaagacaaaaattagctgtgcatggtggcatacacctgtagtcccagtcactcaggaggctgaggtgggaggattgcttgagctggggaggctgagttggcagtgagttgagattgtgccactgtatacttcagtgtaggtaacagagcgagaccctgtctcaaaaaataaaagtaaaaaaaaaaaaagaaatatggaatacattattgttaactctaatcaaccatgctatgcaatagtccaccagtaataccagtaatagccaataatgaattatctgaaaaagaatacaatttattcttagctatctactgctaaaatttttaagctatcttttatgatagctgaaacaaaagaagtaaatttaaccaaggaagtaaaagacctttataatgaaaactgtaaaacattgatgaaataaattgaaaaagacacacgcacaaatagaagatattccatgttcatgaattggaagaactgatattgctaaaatgtccttaccacccaaagtggtctacagattcaatgcaatttctgtcaaaacaccaatgatattcttcgaagaagtagaagatcctaaaattagaaaccacaaaaattcctaaaacctgcacaaaacaccctgagttgccaaagcaatcttaaacaaatagaacaaagctagtggcattacacttcctgacaatcaaagcatactgcaaagctatagtaaccaaatcagcatggtcctggcataaaaacaagcacatagatcaatgaaacagaataaaaatcccagaaataaacccatgcatctctagctaactgattttcagccaaggagccacatgcacacaatggggaaaggacagcctcttcaataagtggtgctggggaattggatattcatatgcagaagaatgaacctagaccctatccctcaccatgcacaaaaaattaactcaaaatgtattaaataaagacttaaatgtaagaactgaaactatgaaactactagaagaaaatatagggggaaaatccatgacattggtctaggcaaagagtttttggataaaatctcaacagcataagcaacaaaaccaaatataaacaaacgggatttcatcaaactaaaaagcttttatacagcaaagaaaaaaaaggccagcagagcaaagagacaacctacaaatgggaggagaatatatttgtaaatatatacatatatatttgtaaatatatacatctgataagaagataatatccaaaatatataagaaaattatgtttctgtatagttttatctgactgggatacagaggccacatccacagtcccatcctcaaaggccacttgttcccaaaatgtcaagcacatccctcaatgatccatcatcaacacctatgtctgtaggatgaagggtgaatcatgaagcactaaaaaggaagaaggaagccaatcccaaaacaaaatgatgcagggtctggaaagtccaaagcattttttttttttttttactgcatcttcctcctttcttctccacattcccaatcctcactattgattaacaaaacaaaaaaaactgggacccaccatcttccctactgtcaggagatctagcgagattgtttgagtcttagaccaaactttgccataagccaaatttctggctgactttacaatgatatgagctagcacagtctctttttctgccagtcaacttgtgctcggttttatttgcaaccaaatagaggtggtaaccaaatataggtgaccctaaaattagtcatcaggatgaaatcctaaaatgtgcaacaaactgggttgaattcaggattagtagcaacatctctgttgtgggcttgaaaagggggcacccttttatgcagtagcaaaattgctaaattgttgtttgctgagtctttggactctcatcccggattttctatgaccattcaaacagggctgcaatgaacatctatggttgtttagcttggcacacttctacatttctatatagtaatatctagaagtgcatttgctcaatcacaagatatgcacattttataattgactgctatcgaactaccttaaatagccttaatttgttctcaacattgtttaacagggtctgtttaatgtcctacgtccagcaaggacagtatcacttttcttaatatttttcaaattattggaccttaacaaatacttaatgtgcaattaattgattcctttgtattcccatgccttcttttatatgtttccttatagtacacaaaaccacattattgtttctttacttgtgtcattccaccctggaccattcctatctaaactataacattatgagagagagagagagagaaaacaatatgaaaatataaattgattaatcaaaaaaatttaaataggacaaatcaggaagacacaagagagattttaaaattattcagagaataccacaatagctgtaccaatatattttaaaacttagatgaaacggacaactatctcgataaatgtaaattaccaaaactgactcatgaaaaaatggatattatgaatagagcaataatcagtaaagcaattaaaaagacagttgataatttttatttactgacaacaataacaaaatttcaggtcctgatatttttatggtgaattttaacaaattttcaagctcctcctcaaccaattctcagaaggtttaaaactttaacaagaaaacactttctaacacattttcagaagctgttatagcatgataccaaaaccacacaagaaaattatagaccaatctcacttacaaatatacatgcaaaatcaaacaaaatcttagtgaaccaaattcagaattaataatagcaaacaagcaaaatatgttatcatacgtatggcttatatcaggaatgcaagtatgtttcaacatcagaaaatacttctccacattaacagactaaaggagaaaaacgcttgtttaattatctcaataggtttttagagaattttgaaaattttataaagttatgcgtattctgtaaaattgatgaaatccaaccttgatttatttttaaaaattgcctttcctatagaattataggtaaaggaaacacatgcatcctcacagagctacttcaaggctaagttacttcccataagtaacgtatcctgtaatgtgtgcttggcacatattcaatactaaacaaatatttgcaaatcctcaaaccacttctcgctcaaataacccacctttgtcttttgcctttatgttagggttgattttctcaattgtatcttggagatcctttggtgggtctttcagcaattaccctgaatttgcttttctgtttacaattttaattcctgggaactctttcttgttctctgactgcacccttttcatgagagttcagccatcaatcctccagaaccccaccccccccgcccccccaaaaagcaataaagatgtctaaaagcttccttctgggctttcgaatgatgtttaccccaggcatttgttctattcgttcatcacccattttccctacaacttgcctacacttgatatcagatttttatttattagtcacctatcttcttcattggcccattttcctattttgccactggttgttctcaaatgtgttatgattcctggttgtacagtcaagtggttgataatcttggatatacgataaagatttgctctgtagctgtgtgtaagcctatataaaagcttttgtatttttcttcttaaaaaagacaaaagatggttgggaagatccctccagttcaccagttcgaggctgcagtgagctatgatagcgccgctgctctagcctgtctgtctgtgaaaaacaaggggggcggggggcgggggggaagactggagatgtaaatctcccgcagggccctacccgtatccgcaacaggtctctaacaggaacagcctcaggcctgtgttggaacaaggtaggttacagaaatctggaagccagatctgtaacttcagggtaaggactggctctcagggctgatcccccgggctgggtgtcccagaggcacccgcccccgccccttccccaaggcaggccaggacaccttcactcctctccttaggctccccacccccttctcctccccactgtgcctcctggagtagcggtggcggtgccacaggggagcggggcggggcgggctctgagggcaagggggatgggccccgccggggtcactggcggccaccctggaaactcgacgcaggccggcccttctagtgaatcgtcccagccacagctggcctcccagccgcgcttggggcgcctcggggcgcgaatggtgcaggttggggagactcaccacgcaccgtcgggggtcggtccggttattcctcaccgctcggctccagtgggcgcgcgggcctctcctcctcagttcctgcgctgcagtccctccctcacccttcgcagcttgggaatccaactgtgtcattccgacggagcgccgtgaggacctccgagggtgttagcgccaagtgatctctgtccagcgctctgaatatccaagtaaaggagttcaatgaagggcgggtcaacggaggagaaaccgtgactctctcaagggagcccaaggcctccttgtctaattagtgacgcgccaatggatggaggctcttcccaccatctcttcccagcatccagtgacaccaccgccaagggacgggctcggcggaacctgcaggaaagaagcatcggctgagcctgactgcagcgctgtgaagagacaggggaggggatcagtagttggtcccgcgcccaccccctgtttccgcgaggggcggagttgactggccatgcaggcagagggcgaaatgtgaaattccactactcctaccgtttttccctgacccgatggggcggagtgtcgtcaggctaagttccctggcggtaaggtggggagattgaggcgcacacctgccgaacggtaacgcaggattagctaaggcgagctcaggacagaagcctcccgaggagcaggagggcaaaataataaataaataaataaataataaataactcactccttggtctttatttgcggcaggaattcagaaggtgaaagcggggccttaggatctttctgaccttttgggttttaagcaggaggtgtcagaaatgttaccacagggctagctggcttgtggccagcaagcgttcacaatgccctcgatttttcatccctctctgtgggttctttttttcattgtaaggcagaatttctacgattgctcacccactcagagaacctgagctggtttagaccaggtgagacaggctaggtttaccctggtgatgatgtgttgttgccatggcgatcctgcccagtaccagaggccctgcagattcagatgcttggtgcctgtgcttggctgaggggccaatgggtgaagctgccatctgcgggatgatgactgaagcctctaagtcagaatccgcccaggctgagccttagggcagctccatggagcctcggctggcctgggatagagagtccaccactgtgccagcccccagccactgcctaggtcctgtgctgagagccccttgtccagggaaatggcgtccagtggaaaagggaccacccccttgcccttcactcaaggcaggttggtgacaaccctgaagctaatccgttcctagaggagctgcttctgggtccgagttttctctgcagcagagcagctccctggatgggatctgttcaaagtccgcctttcacgcggaattttccgtccttgcaattttccacctccaccactaggggatcctctctgaccgcctcatgccggctctggcctctgagcaggggtttctcttctgcatgtgcgaccttgcgcatgcctagtggccttttgggacctagagctgctccacaccccgatggggttacagagtgcctcgcctccactccaccccaccagggttccttccctggctgggatgggatttcagaagcgccgaggaacagcccagacaggtgtgggagagtagccaaggcccctgtcccggggtggccaggacagcggtggcctcgcataggacctggctgggctgctgcaatcagtgtcctgccccttggagagcaacagtgaaaacaacaagactatcttcacccaccttaagaaagaacagaaccagtatccccaactctgctgtgtatcccaacccaattccattccccaccccactctcagtagccaatatgcaaaatattagaatactcttactgttattattttcaaccacactctgcatcctgaaaaaccatatatttcgttatgtgcttttaaacttcttgaaaatgaaatactgaggctgggcgcagtggctgacacctgtaatcccagcacttcgggaggcggaggcaggcggatcacgaggtcaggagatcgagaccatcctggctaacacagtgaaaccccatctctactaaaaatacaaaaaattagccgggcgtggtggcgggcgcctgtagtcccagctacttgggaggctgaggcaggagaacggcgtgaacccgggaggtggagcttgcactgagccgagatcgcgccactgcactccagcctgggcgacagcgccagactctgtctccaaaaaaaaaaagaaaaaagaaatactgaattttcaaatacttgctttttttttcggtcaaaattatgttctcaaatttcactcctgtagatgtgcgtggctggctgtagtttttgcatttttattattaggtattctcctgttgcattaatatgccacattttatttctctcatgtttttggtgaccacttggggtgttttttggttttgtatttttgctgtatacatgctgccatggtggacatacctctttatacatatttcctgttgtatgcagacacaattttaggatgtgacatcttcagcttttctattgtgtcgtgtgtcttttccttcgtgctttgtgttatttacatattctggacacagattctttgtcaactgtatgtgctgcacatctctttcccagtttgtgtcttcttcttcttttttttttcttaaaaaaaactttctttatagtgttttttttttctttctttctttgttttgttttgtttttttgagatggagtcttgctctgtcacctaggctgaagtgcactggccgatctcggctcactgcaacctccgtctcctgggttcaagtgattctcctgcctcagcttcccaagtagctgggattacaggtgcctgtcaccacacccagctaatttttgtatttttagtacagatggggtttcaccatgtttgtcaggctggtctcgaactcctgacctcaggtgatccaccctctttggcctcccaaagtgttgggattacaggcgtgagccacagcacctggcctgtgttctttcttaagtagatgttacttttaatataatagaatgtatcatattttgcttttatattagtactttttctatctaattcaaacacatccccaagggtctttgtgtgtagactgaccaatttctcaagaatcatgaatgaatactgcttctctttccccaatttatctgtaatgctacctttattataaagtttctatgcatgtgtagaaatagttcctgatttttcactctgtgccaccagcataccaatagcacgctgtcttaaatattaaatagcagagctttatgagacaacttgatgtgcagtaggcaattgcccccttgttactcttcttcagggttctttgttgtaccacatgaattttagaattggcttgtccagctaaaagacaactgcaaggattttatttggaagttcataattctatacataatttggggaaagtattttcataataccaagtcttcctattaatgaacacagactctctctctctctcccccacccccacctgtttagttatttatatctttatggtctgttagttattgtttattgtctttcaaccaggtttcatgtttttctacatagaggccttgcatgtgaaagtctttcttcctagcttgctattacaaattttttttaattgcactttttgggtacagtggcttgtactgtaatccccgatacctgggaggctgaggcagatggattgcttgagtccagaagttcaagaccagcctgggcaacataatgaggtccctgtctcaaaaagtttgttttaaaaattgcatttgctgttattcaacaaatgtcattgtgtctcatatatggatttttatatctgataaccttgttcaacaatcttttgattctaacaatatatcagattcttttgagttttccatatagacaataatgtcatctgtaaattataattgtttcttctttgttatttcttggaccttttattttatatttttgtcttgctgcaaggcaatatccctctatatattgtggggtcttttttctcataaagtggggatggtgaacacccttgtcttgctctctgattgtataaagcatgctttctgtagcattttgtagacgctcttttttagattgaggtaattcacttttatttctggtttactgagtttttagcataaattcaggctgaatttgagctaaagctttttctggagacatcatttgaaaaattcatatgatttactttctttaagtcaccaaagttatgatttacattgaactgagtttctactgtttaactgtattcttgggagaaaacccacttgtcactgaacaatatctgttttatttactgctgtcttgtgtctaaattttcttttaggattttttgtatatgctcagattagcctgttattctcctttctgtatttttttctggtttgggggtcaaagttataatagcctcacaataagagctaagaaaccagccctaatggaggccggggcaggaggtttggagttcaagaccagtctgggcaaaatagtgagacccccatctctatgaaaaatagaaattagccaggcatggcagtgagtacctgtagtcctaggtacttgggagggtgaggcaggaggattgcttgagcctaggaatttgaggctgcagcgaactatgattgtgccactgtactccagcctggatgacagagcgagaccctgtctcaaaagaaaaaaaaagaagaaataaaaaggaaaagataaaagagctaagcatctgtttccttttttccattttctgggagagtatgtgtaagactgtaattaactgtttcttgaataatgggagaactctgtaaaataatctggctttggtgttacctgtattggaaggatgaaaaataccaattcagtttcattattggttgatagggctactcatgctttttgttttgttttgttttgttttgtttttgagaggaagtctctctgtattgccctgttgtccaggctgagatgcaacgttgttcacaggcctgatcctggctcactacagcttctaacttccgatctcaatagatcctcccgcctcagccttcccagtagctaggactacaagcatgcagcatcacatccagcctcttttcctgcctgacccagttctggtttcctttagttttctaggtgttcatccattttatctaatgtttaatgcatttggcataagggtgctcagtgtcctttcattgtctgttgtctgtaactgttgccattttcattcctatttatgagtactggcgtcttctctcactttttcttaataatcctgctggaactttgctttttaaagaacatcttttgacttgttgattcttttttcatacatattaactattttcttattttttgcctttatatttatttcttttcctgtttgaaacattgctcttttcttactataaaaatgggtaagtagctcatgaattaccacctcttttaaaaatcttttctactgtaagcattttagcagtttacatttgcccacaagtaccacttcagctacaccctatgtgcttttacataaagtcttcatttttggtaagacatattctcaaattttaattatcacttgtttttaaatccatgatgttttatttgaaatgttgtttctaaagatacattttctggttatacttttattcttctaatttagcacagtggccacaaaacatggtctgtgcagtgcatacaatcgatgagtaatttctgagctgtagtatttggcataatatatggcaaaatttcctaagttttccatgtgtgctttaaaaaacttccagtaaaatacataaatctgttagatcaagcttctcacattgttcaaatagtctatatgtttactgattcatttgactgcttgatttatcaattacaggtaggaatgtattcaaatctcctattaaagtgtgacactcaagtggctttttaaagacagagatgccaaaccaatgaatacatgattttccccaaagcctgcacaaattctctaatgaaattttaccatgaaagtttgtttaattaaggcttactaaagcagtatgttgtcttttactttttaaacagagaatatatattttaatacatcgtttaagtttatgattaattatctattactgaggataagaatctttgcctgtgctcattcagcatttgcacttcatttatgatctgccttctcatagcttctgttaatttttatactagagacatttatttgtttgtataaatgttgaaggtttttttttgttgttgttgtttttgagtcagagcctcgctctgtcacccaggctggagtgcagtggcatgatctcggctcactgcagcctccatctcctgggttaaagtgattctcctgcctcagcctccagagtagctgggactacaggcatgtgccaccaagcaaggctaatattttgtatttttagtagagatggggtttcgtcctgttagccagggtggtctcgatctcctgacctcatgatctacctgcctcggcctcccaaagtgctaggattacaggtgtgagccaccgtgcccagctgggttttttatattataaggagatgtaatagatagatagatgtttcaaagatagtcaaatgtttttaaaatttaaaacacttttttacaggttgactttcaccatttaatttcatctatgtgttttgccttagagaaattttaaatgctatgtagatctcatgacttataattatgaagcattttgttttctgttttccacgaaacttagcttaactttgagcatataatagttgtaaaggtaggagagtaacactgaaaaaaggaattgcataaaaatggcacattttctgtagagttgtttatcgcctgaaaataggccccatttcatggaagtaagatgatcaggctcaggtccccagacgaaactcttggcatggtttttggagatagtccagggctcagtactggctctatcatttgctacttctcccaaagtaaccaatatctcatccaccctgagcccatttccatatctctaacatgaggataatagcatctaccttacacaccaagtagagggatcaaatgtaggaactaaatcaaagtaccagcactgaataacctacatcctcccacttcccaaaaggaagagagatgtatcccctgttgacaaacgagaccattttgcaggagagaaaggaaatgccagttcacttgcaatgtaaacatgctctctctttttagggatgtccagggacctgagagagaacccatgcttaccaaagagtttctagttccagacacacaggactcgaagggtgacaagtatggttttcagggtccctgaatccacccagtcctcacagaaactcctaaaagctgtcgattgacagcgttgagttcacagctctggtcctcacatgctgatactgcttgtgatatcgaacccgacaggaccccacatcacaattgatttaccaactacaatataatacctcctgaatctccaaattggctcacccaggaacaaaggcttggggtaaaactggattaggagatataagctctgaattttctgagggtgagacacacaaggattctaagtgacacgccacagagtaacgggtctgtgactggaggacccacagatttgtcttactggagacaccacatgcacacaaactccatccttagctgtggaaacaagggtcttttgctatcttagccgaattctgggagtaatttttggaggggaggagatctttgggattgcctctttcaggccctttacaaaaatacctacttcttaaatggtaaagcttacactaaactgaaaaaattacatccttggctttttatgaagtaggtgttggattgaatcactactggaagaagtatggcatcgcaaattctaagcagtggtcaaaggatggatctgttaaattagaaaaatctctaaatttataaaaagattttagattcctttattctaaacaattgacctatttgtactcatgggacaatcaaatttcaaaggagatatgtaacgatttcatggcttgcattaaaaatccttctgataaaattaaagataaaaaatctgaccccctgccaaaaaaatcttttgaagttcatactgcctgctttcaatattctgtgggattcacaatgaaaggtgccttatattgtggcctagcttcaagtttatgccttcgccaccatggcctgggttcaattcccagtcagggccccagcgcctttggtttaatgtttgcgtggcatttgacttttttacctatttagtattggtgagattacctttggtaaaaaaaagtttaaagagtggaaatcgcaattctttgtgttggctaaaatctgattataagagatctggaaggttttatttttctttttcaaagagctctatggtcagaagtcggcttcatgaaaagctaatatttaattatatgtacatacagtctttctggattttctcttttgcctcctgttttgaaaaatatttggatttgagtgaaactccgttttagaaattaattgcttggtacaatatacccatgtaactaccctgcacatgtaccccctgaatctataataagagttgaaattttgacaaaataaaattagattttgaattaaaacaaataggtgcttggttcctctgctcacttctttttaaaaggaattcctctcccatgtacttcttcttttcccttctttaccttccttttggcatctttggtatcacatgaagggatctagagggaattttaagtgactctgaaattccttgagaaatacacaaaaagatcccactcaccccttttgggggtctcctgttctccttgtggagtccagagtcagggacaggctcctccaggtctgcagctctgctctcttttatttcatcttggctgattgctttggttttgtgagtaccaggcattactttgtactgtgagagacacgtcctttgtgagtgcaacggctgctgggtcactggtgagggctgcagtttggagatggctgagagccgttgcaataaatggttgtgattgcagggggctccttgtttctttgcaagtttagatgagaaaggtgcagtttggacacagtttaaaggctgtgaaaacaccaccaatgaatatgatttcctttggggatggtctgattaaaagtgggctgattgttgctgtgctactagccttgaagacatgtttctacagcattgtgcagtgtggaaaaattgtgtggcttggtcttgtggcatgtcccttcttttagagacctcagattcaatgtgaaattcgggatttttgattttcaaagatctagatgccctgccttccagatgtgcctactcttcacatattttaaaattagatcctataaactgcaaatactttgttggcttctgtgagatcagaggtccagttagaaaaggaagacagtttgttaaaattaaaaactatttatctaatctaactagattggcctccaaatatgactttctgacattcagctggttactctgaaaagatttctaaatctcttgaggctcatctatatgtttccttgcaaagaaaaaaaaaaaaaaaaaaaagcaagcccaagcactagtaagaaaaagatttgcaatgtttcatgaaaggagtagatgagtgaagcatttatttgtagatactgggttggatacctgtgcaaagaagaagaggtcaataataaaaattgccaggggatttcttggaacttaacaagctgaattaaatatagaaatgtcaggaaatcaaggcaggaaatactcacttgtggttaggcagacagggcagggttctgagcttgagatggagcaaacagttgtggtgggtgaagttcacatgctttagagctcagctgtcctagtaaagaagcctaagagtctctaaagctcttatgagaagatggattttttttgcctagattaaaaggttaaagaattgctttaagttggataaaataaagctaaatgtttaagcaagttgtgaaaggtttatgaaaaaattaattaaaatatttttgtgtgtaaacatattgactaaagttgaaggggtataattcagcatttctgtaaattgagcattgaaataaaaacacaatgggtttctcttagagcactaacctgctctttaacaaaaattgtaaagggttatagaaagtctataaaaatgttaccttatggtcaaacattaaaattgggtaaatatgtctatcaggttttattaagaattaggtttaacattaatagtacactaatgtaaaggtgaaatttggcttatttggtacaaaaatcatacaggaagcattgtgaaatataaaatgatttttagctttctttgggctatatttctataaatatgttattgatgagggttccaaagttatgggagactcctataattctgctatatctcagtgtacattatcagtcataattataattgtcatgttaaattattgtgggccacagaggtaacagatttccttgtcaattgtgtctttgactatgactaccctaaaacgttcagtcacccatatacacatgttaccttgttttggccctctttagaaggtaattttataatcagctataaagccctaacaggtgctcttaaatgcaaattttgataactttggagattgtgacatcagaagagaggaaaaatgttcgggacacttggagagctaaaatgttcattgatatcaagcaggacaggaattaactgcatgaagtgaactaataggaggctgaagtgatctttttgactttttgcttaaaacgttgctgatcctttgttttgcttttcagagtcaaggcaaattttcttttgagctattgacagcttttaacgattaatcaaaatatactcctatgaacaccatttggagcattatttgtttctctctacccgatttccccagaatttggaaactatttgtgggtattcttaatttatggcaatatagttatttgcataagtgcaataagaatgtgttttctttggtaacaggacacaatttgaaaaactggttattttaccaaggttttgaccagaatgctgtgctttcctttaaggaatcaaacttgacttgtggagctaataaagcctttggaaaactgaccttatatcctgtgaacacagtccctgtacagggttactgatctgtgggaagaaaagaatgtcacattctgacaggtcaggaatcccaagttatcttgaaacttcaagaggacaggaattcacccaaccatatgtatttgatggtagaaatccatggcaggggctcagctttaaaaagtcttatctcagattccttctataaaacaaagtcccattaaaaccaattttaaaagcctatgtgaaaaataattattcttgctgcacctcgtacaaataaagtggcaaagcataataaagcaaattggtcctgtcgtaatttgtctttagtaaaaacgggaaactggggtcgggtgcagtggctcactcctgtaatcccagcactttgggaggctgaggtgggcagatcatctgaggtcaggagttcaagaccagcctggccaacatggtgaaaccccatctctacaaaaatacaaaaatgagccgggcatgatggcgggtgcctgtaatcccagctactcaaggggctgaggcagggaagcggaggttacagtgagtcaagatcgtgccacttcacgacagcctgggtgacagagcaagactccatctcaacaacaacaacaaaaaagggtaactggagagagggaagttatgtttcaaaaacttttggaaactatagtacacctgtttttaaattctagtctggcattcagtttttattattttctacagtttgggttaaattcgtatttctctggctacaagtctcctaaataatcttttcatttgtttcctttttctttccctttttccccatttttcttaattggaaatcactgaaacctaagctgtgctttcttaaagccctgtgaactgaagactagacaaccgaaacttctgaaggaagtagcagcaacctatttatatgtgttgctgttgcctactattatgttttagcaggtgctgcctctacacccccgaaacagagagtgctactgggaacaaatcgactttttccactccagtgctgcattcggtgccccataacgatgaccccctctcagcaggaagtagccagaaagattacaatgctccatctccctatgattcttgtgataaataaatatacaagcatgatagaaatcatgcgcaaattgacagtggggattgtggcaggccagatttcactaatggaggtccccatcacaactacttcagtactgactgagtggttaagttcagtatcaaaagctgaaagtgccagcgcctttctacaaaggctagaatgtaacaaaagcccaccaagggttttacctaggcctttcctgggccttacagcatgacaaaacaaagaaggaattcttaaccagacctgtttaggattaaacaaatttaattgggggtctgaagaaactcgccaggcctccacaaacaagttcattgggggtctaaaggaaccccccccaaacctctgtgattgagcaggagacaaggtcagggtaattgccccagcacctggactcatttagatttaagtaaatgtactgaggctccagagaaaggtctccaagacttagactagagttacagattaaaagaagttaatcacttatatctttagataaatgcacactgacacgtagacatacatcttagaaaatatataagctctggaaaaccttgtaatttacagttggtctggagatattttctgggccttctctctgtaaccggttccagaaataaaaaactctcttcctccccagtttatctgcatctcgttattgggccgtgagaaatagcagccagaccctgagtttggtctgggaacacactggctgggcttcctgcctggcggtagagcttcactgtcctccttcccagccaaaatgtggcccttgaaggcttcctccccaactgaccggttttgggttctaggtactcagggaacaccgtcttcaaggaggccattttcatactgttcctggtttgatttttctgaaattaggaaatgccccttgaggcatccaggattgtctttatttcccctgaagcttcccctcctgaagaaaaaagttctcaaacaccctcaggactcaaaccccaagttcaccctgtgaaacattcccatttcctaaacccaggcaggctcatggccctcagcctctcagaccccatggaaacctcctcccccacttcacgggttctctccatattgagagcctcccctcctcggcacacaacccagagactcaccccaacatgtgtagcaaatcaccctggaaacaatcatggctgaacgtggtagcccatgcctgtaatcccagcactttgggaggcccaggaggtggatcacctgaggtcgggagttcgagaccagcgaggccaacatggtgaaacctcgactctactaaaaatacaaagttcactgggcattgtggtgtgtacctgtaatctcaactactcaggaggctgaggcaggagaatcacttaaacctgggagacagagattgcagagagccaagatcgcaccattacactccagcctgggcaagaagagtgaaactacatctaaaaaaaaaaaaaaaaaaaggaaaaggaaaagaaaaaaaaaatcatgaggcaacattgcatttaacaatattttatttatcaaaagacacttgtctttctcaggtaagtgaaggtctagagatgaaacgagtcccgatgtaaattgccccatgggcattgctgagatcacaagatcatcactgcagcatgcagcacaatagtaaatttctcaggatggaagttcaacaatccaaaaggtagtattttttttcatgatgctcagtccatcatacgaaataaaaataaattccttttcatgatcatccattcagtagaaaaaatgatagtaaatttgttctcatgaagatttttaccgtaacatataggatttatcgttattattattattctttgttttttgtttttttgaagcggagtctcactctgttacccagtctggagtgcagtcgtgcgatctgggcacactattaacctccacctccagggttcaagcatttctcctgcctcagcttcccgagtagctgggattacaggcatgcgccaccacacccggctaattttcgtatttttactagagatggggtttcaccgcattggtcgagctggatttgagctccggacctcgggtcatccgcccatctcagcctcccaaagtgctgggattacaggcgtgagccaccgcgcccggcctcaatttatcattattcacgcatccacaaactgggttcttatattttgtacgtgattttttccattgaggagagatatctgtgcatattcatgctgctcatatttcatccacaaactcggttcatatttcatccacaaacataattttttccgttgagaagagatacttgtacatatttatgctgttcaaattcacatttcatcattcttttacaagaaatagataatgtattttaaggttttccagtggtattacagatattttactgggtgtatagatagaaattaaaccaaacttctttgttctggccgccagtcatgcatcctgttttcaacatagttcacatacaactggttgtgtaaaaatgaaattattttgtttagtacaatcatcaacagttggttgattagatttttaattatcaagttaatcattgtcattatgcttctcatcgcactcgtcattaattgctgtgggaggaaatttgttatgttccctatgagagggtgtatcacaaattcaaataagaattcaacgacaatggactgtataaaggaaataagcaagtccatggaaaacatatttttttccggaaaggattaaaatatttttaaaaaggaattaaaaaaaaattgggcacggtggcaaatgcctagagtcccagctgctcaggagatggagacagaaggattgcttgagcccaggaataagttggaggctgtagtgaacagtgattccaccactgtactccagccagggcaatagagggaaaccctctttctaaaaagacaaaaagaaacaaaacaaaacaaaaaaacaccacatcaaaaaacccaacaacaaaatgaaaaaccaaataacagcaatacaattggagctattcgatccaaagaagtaaatgaaacataaagcaaataaaagagaaaagctaatacctgtgtcctgcaggactcagtccaagttctgctctgactccctcctggtgagccaccccttaaaaagtcacttggggcggggttactttgacagacagtcttctgtcaaagagggaggcggtaaatagcacttttttttttttaatttaacgcctttccaacaaattagcggctatgttgtctaagagtgcaaatgtcagaggtgggtacaggcagcaagaccctccccacaggggcagcagaaggaggaatgactaagggaacaagactttagtgtgctcaactacacaggacaggaaacagatgctttttacaaaagctggtggacttgaaggcagaatattttcaagttcctgtaactgcgaactatgacctgtagcctgtgagagtgactttctgtggcaaaggagcttttgtgaatgtgaggaagttaattatcttaacagtgggaggttctcccggcttatctagctagaccctcgtgaaatcccaagtgtccttaggaaggggaagcagagagagatttgagtccagaagaggaagaaggtgatgtgaggcccagtaggggaacaaagggcgatggcatgtaaacacttagcccccagaagtgggagagggctggggttcatcacaccagaatccctaacaatcagccttattttaattacccttgaaatggaaggaggccttagagagccagaggcttggaggggcaccctctgctgcatacacagatcccaactgctgtgggctccaaataattgcaccagggaaatcacaaattatcaaaaataaaggatgtaaagcttttaaaaaatattaaaagcccaacaaataaaaaaagttctaaatctataaaattgacctcagtctgtatatttagatgagtcatgtgtatatagcgtttcacttcaaaatatatgataaatctctcattcattggcttaaaaataaacacttcaatcaagtctttatcagaaaaattgaaacgttaactcaattgccttttagttcatgtgactttacaaaacttaaaacaataaagtcagttttaaaaattattagtaaagtaaaagaaaaatatcttcacaatgtagacattttgtccacatgagacatgtgaaatattgccattactaaatatttgcaggtcaaaaactgtttccaaaacattttaaataatcatctggcctgtctgttttagagcattcaattctagctgaggtctggggacatgtgaaaggagccacggcccgactccgtgctgggaagagtcagacattttccacagctctgtcctttgctgtgggctctgcaactcctaccaattaaaattgcttacgtttttgttttatttttactaaagaggggttcctaaaagctaacattatactgagtatatgtaactaaaactactaagaaaacaatttcacaattatacaaatgtgccaagtaaatgaaaaaataaactgtattttaataaaggttataaaaagaaaaacatatagtggtgtgaggactgtctcaggtcttcactgagcaagggatcatgacattctatggcggacagctgaccttggctttctgctcctcttgattatgtctactaagtgacatacttactctttttccacctgtcttgcctctaagggtaacaggttttatgagatccctcctagtgctttgcaggtcagcctccctttgctgcattccaattttactgcctataccctccagctggcttttgatgacaaaagtcctggtcccagccattctcagattctgtcatccccgtgggcactatggagctcagcactatgggaggttccccaaaaatctcgttttctatgaggaatggccaccacctgcatctcagtgatgctagtgacccctttcctactcctgtgctcactggtcctcatgaagatcctggttggtctgtagccccctatttttcctattaaagagaaattacagtaagacccatttgtgtgcaaaatcaattttaggcttattacacttggcctgataatttgcataaaatgcagcaagaattcatcggccatataggctacttttgagttaattttcctgggtttttacctaaaaatatactattttggttagagtcttgtgaaaataaccaatgtgttcaattgttttattttaaaaggctcttactgaacactataaatatgtataagttgaatatacaaactatattgtcataaaatcacaacccaaaatgtggagaacgcagagggaaaggtaaatttgctcgcaaaaacatacttcacccaaataactggaaaaaaaaaaagactttcatgacccttctttaaccagagcagcagctttcaaacaaggtgtttgccttggaaatgccattcacaagccaaacggcccttgagagctgtctgtcaggcactgtagaatctagcagctcctcacagagttagaaatagtttcaggaaagagattccctgcttttagtaactgcactttatattcccagatagcgagattgtatgtaaaccatttttatcttattctggaactcttttgggtactttttttttttttttttaaatgatggagtctggctctgttgctcaggctggggtgtagtggtgcgatttcagggtatgagaaaatgcagctggacctggctctttccaggaagaccctcacagccaaggagtccaaagcctggggttttcatctaattccagtgtgactggggtaggagcagctttggtgctgggtgtgtgtgtgtgtgtgtgtgtgtgtgtgtgtgtctatgcctgtgtctgtttagggtgttaggctcgtggttgtctagatacaaatgtcccagggctcaggagccccagggttatgtcaggggcaccagatgaaggtgtcaacagaagttagggcacaagggacaaaggtgagagcaaggttagattcatttaggtgcaagaaatcatagagggaggagggagaggaagccctcctgctaccaccgaggaagaagcgcagcttaaggcagaaagcctgtccggagaggaagtgagtttgagggcagggctctctgggtaaagtacggtctgggacaccagcctgggggaagggtacagaatgcagagtggcctggcgtggggactaagaacagaggagagcagctttcactgggagggtcagtgttttcagtgtccagcactgagcaaggtgagatttgggcagcttgctgtgaaataaggtcaggctctggcattgtccccattgcgtgtgtgtgtgaggggcactttgggagagtgaactctccacctccatcctctcatacgtccttcaaccgagcttgccagttaccctgattccaaggagatctatttattgttgacaatactggatcctagcagaggctgggtaggagcctgggcacaagcaagtggaggagggggcctgggcctgaaagacctgggaggtttgagagaggacacagcccacagaatggagcagatggggtagagtcggcaagcattcagggctcctagtaagttggacaatggagaccctgaaagatccagtaaaacggggagaacaaacaggtccccaactcacatccttgcagtgcctggagcttcagactccagacaggtggggaaggaaaattgagggatgtgaacatgttggagaatgtcgtgccctgaagaatgaagaaaaggggggtgaggaatgagagcaggaacggcttccagtgcctggtgcccaggagaactcagaaaatgggtgtggtggagaggaatcgaggaaccggaagtggtggaagtgtgcagggcccctccgagatcactgtgactgccaggcgtcctccctggctggagagcttcactgtcctccttcccagccaaaatgtgtcccttgaaagcttcctccccaatggactggttctgggtcctatatatttgaaggggtggcctgcctctccacacctgtgggtatttctagttgggtgggaggagagacagagaaaagaaataagacacagagacaaagtataaagaaacaacagtgggtccaggggaccagcactcagcacaccaagggcctgcaccggcaccggcctctgagtttcctcagtttttattgattattattttcattatttcagcaaaaaggaatgtagtaggagagcagggtgataataaggagaaggtcaatgaaaaacatgtgagcaaaagaatctatatcataattaagttcaagggaaagtactatgcctggacgtgcactcaggccagatttatgtttctctccacccaaacatctcagtggagtaaagaataacaaggcagtattactgcaaacatgtctcacctcccgccacagggcagcttttctcctatctcagagttgaacaaatgtacaattgggttttacaccgagacattcagttctgaggggcaagcaggagacagtggccttcctccatctcgactgcaagaggctttcctcttttactaatccacctcagcacagaccctttatgggtgttgggctgggggacagtcaggtccttctcatcccatgaggccatatttcagactatcacatggggagaaaccttggacaataccccgctttcaagggcagaggtccctgcggctttccacagtgtattgtgcccctggtttattgagactagagaatggcaatgacctttaccaagtatactgcttgtaaatattttgttaacaaggcacatcctgcacagccctaggtcccttaaaccttgatttcatacaacacatgtttttgtgagctccaagttgggtcaaagtggctgggtcaaagtggctggggcaaagctacaaattaacaacatctcagcaaagccattgttcaaagtacaggtctttttcaaaatggagtctcttatgtctttcctttctacatggacacagtgacagtctgatctctctttcctttccctacatatattcatggaccacagtcttcaaggagtccatttcctcactgtttttggtttgatttctctgaaattaggaaatgccccattgaggcacccaggattgtctttacttcccccagagcttccactcctgaggcaggagcttctcaaacaccccccaagactcaacacctaatttcaccctctgaaaccttcccatttcttaaatccaggcagggtcatggtccttagcccctcagatgctgtggagaccttctttccctttcatacattctctcaagattaaaagccacccctcctcagcacacaccccagagactcaccccaacatgcattgcaaatcaccctggaaacagtcataagaccacactcatttaataatattttatttatcaaaagacactctttctcaggtaagtgaagttctggagaggaaaagaggagtcctgatgtaaattgccctgcaggccttgctgagatcacaaggagattgttactgcagcttgtagcacaatagtaaatttcttctctggatggaagttcaacaatccagatcgtagtatattccttttcattatgctcagtccagcaaatgtgatgataacaaattccttttcatgatcatccattcagcagagaaaatgtttgtaaatgtgttttcatgaagatgtttaccataacatacaggatttaccattatcaatgcatccacaaactctgctgttgttttttatacataattttttccatcgagaagtgatagttgtacatattcatgctgttcatatttcaaccacaaactctgctggtttttttatacgtaattttttccattgagaagtgatacttgtacatatttgtgctgttcatatttcatgtttcatcatccttttacaataaataggttatattgtattttaagtttttctaactgtagtgcagaaattgtactgggtgtatacatagatatcaaaccaaatttacttgttctggctgataatgcatcatttatttcatagattatgtatttctttgacacatttcacgtacaactaattgcataaaaatgaattttcttttagtatagacatcagcatgtgcttaattcggaatttaattgttgagttaaacatcgtcattgccttttccgttgttattaattgctctggtgggaattttgttatctcatacataagacagtgtgccacaatatctcttaaaatttcaatggcaataaactttatatttaaaaacagggaatctatggaaaacacatttttttctaaaggattaaaatatttttttaaaataattttctaaaaagttaggcacggtagcaaacgtctagagtcccagctactcaggaggctgagacaggaggattgcttaagcctacgagttgggggctgcagtgaactgtgattgcaccactacattccagccagggcaatagaagttaaccctttttctaaaaaaaaaaaaaaaagaaagaaagaaagaaaaaaagcaacaacaccaaaacctcaccaacaaaatggtaaagaaaaaaaaaacagcaatacaatgtaagctatttgatccaaagaagtcaatgaaatttaaaacaaatgaaagggaaaaagtaatacttgagtcctgcaggactcagtccaagttctgctgtgcctccctcacggtgagccacccctttagaagtcacttgggtcataagttaacccgataggaagtgtcctggccaatgaactagggaggtggtaaatggcaccattttaaatttaaattcacggccttttcaacggatcagtagccatgttgggtaagagtgcaaatgtcagaggtgaaaagaggcagcaggaccctcccctagtgcttgggcaacagaaggtggaatcactaaggggacaagactttagcatgctcaagtacacaggacagaaaacatgctttttacaaaagctggtaaatatgaagagggaacattttcaagttcctgtaaccaagaactaccgcctgtaaccggtgaaagtgactttctatggcaaaagcgtttttgaaaaggtgaggaagttaaatatcttaatgttgggaggttcttctggtttatctggctagaccctaatggaatcccaagtgtccttatggagcggggagcagagagagagatttgagtccagacgaggaagaaggtgatgtgagtctgggtgcgggacagggggagaatgatgctatgtggggatctgggctggggaatgacttagctgcatgagcggagtgacttagactcctgaactagaagaaatctagggctcatcacctcagcagccctaaccatcaaccttatttttattacaggtcttccatcgacggactccctaaaaagccagcggcgtggaggggcgccctctattggacaaatagatcttgactactttcggccctcaaatagcctgactaggcaaataacaaataataataatttttttttaaatcatggaaaatattttaaaaaacaattaaaaagttataaatctataaaatctgcttctgtctgtgtgtctgtatatttagatgtctcatgtgtacataatgtttcactaccaaaatatatgatgaaaccctcattaatcggcttagaaaactaaacacctaaatattttctcagaaaatacaaaaactttaactcaaatcccttttaattcacctgactttaaaaatctttaaaaaataaagcatgctttaaaattattagtaaagtaaaattagaacatcttcagaatttagacatttggtttaaattatacaggtcaaatactgcccttagtaaatattttcaggtcataaacaactcctgtaatcttttaaataattgaattacatgtctgttttagagctttaagttctagctaaagcctggggacaaatgaagggcaccatgccccctctctgtgctggaaagagacattttctacagctctgacccttgcagtaggctttgcaactgctacctatcaaaattgcctacatcctaagtttattattaaaaggagttgcttggagttaacattataatgaatatatgtaactaaaactatttctcatacaaagtatatgaaaaagtagaatgtatttttaataaaaagttataaaaagacatgaacatgtagtttttataaaaaacagtaattttgtctagttttgcagttctaaaaagttatgttaaattcaaaaataaaaaataacaagacaagactcaaggtttaaataagttgtaaaagatttgtaaaaattagttctataaaaattttacaaaaaaaagcattggttaaaatttaaggaattattttgtttttacagaaattaaacattcattaaaaacactctgatacaaggccttaatttgggttcatgtatcagaatagcagggttttcttagaatattaatctattctttaaaagaactatgaatgttatgcaaactttataaaaatcttaccttagagtcaaactgattaaaattccatagattttacgtaaaattttattaaaaattaacttcaacaaaaataaaatttgattttctcctttaaacaaaagttttgcgtaatattaaataataaagcatttttgtttaccttttaaactataaacacacacacacatacacatacaccaacactaaagtcagctgacctcatactgtctttattggatattcttgtttaaaaaactatcttctttggaaaataaagttttttattttaaaccatattttaaattatcattttgactaaatccataacatacagtgatctgtaataattctattttataatatcaagtgttttgaagaactccaggaacagccatgagagaacactgtggtttagtaacactttatttcctcagtttgaaaatagttgtctttcttggggaggccggtttcagcagatgaaaacaagagtcatgatgaaaattacccagcagtggttagtgtgaccataggaacattgtcatcaggtcagcagaaaacatatcagcaaatttttctcatactggcagtgtgtaggggtggatgtttacagttcctgaagccccagtggtcgtgtggtcttttagttttgccatttataggcaacttgtggtaactagctcaattagacacattccttatcacaaggacagagggctttctgtatcctagggttcttgccttggcattccagaagaatcaggtcacacgtggacgtggagaatgagtgcaaggttttattgagtggaagtagctctcagcagatgggggagccagaaaggagattggtttctccctggattggggccgttcagcagccctggctctcctctgactgccccaggcaaaatccacatcgttctataagtcggtgccctgctggtgtgctggtgcctgttgtcatgttcctcttcatgtccagccgcctgtgtgttcctccgctgatgtgctcctctcgacgtcaagcctcctgtgtgtctgactgctagggtcttggggtttttataagcacaggatgggtcttagcaggccaggatgatcttgggaaagacaacattcggtcaggaaaacaaaaatgcctgttgtcatctaggtccgtggggacaagcccaggtgtggagcttttagccagggaccacagcctcctgtatccaacacttcccttcaccttttctatatcattcaaagggatcatgcccttcccatcccagcacttcactttcatgtcatttgccccctctgaagaggtacatctaactgccattagaatatggatgatgaccagtcttagctgcttcctgctgaaagggggcattgttttgggggaaaacggcagtcagattcctcccaggggtctctataataaaagatcgaggtggctactttcaggaggtcctctaatgtactatctggtcccaagtcccatttctgcaacctcctcctgatgtcaggagctgcctgagtaataattttatcctttaggattatctgtccctcgattgaattaggagatagagaggtgtgatttaccaaggcctctcttagcctctccaggaaggcagtgggattttcatcaaatccctggttaattatggacaacttagtataattgagaggcttggtcttagacctacgtaagccctctattatgcacacctgaaagtgtctcctcttccagtcttccatctcattattgggatcccatttagggtccttcactggtgctacttctcttccagttggataatattcgctcccttccctgatgctataggtgatgcaaagctcatccccaaatctctctgctgctggcagagcagcctgcttctcagtgtctatcaggttctgactcaaaagtaacataacgtctctccaggagagttcaaatgttagggtgaaattctggaaagcttctatatatctatcagggtcatctgaacacttgcccagatctcccttaatttgctttaagtcttgtagggaaaagaggacttggaccttactgggcccaaattcactgggcatctgtaggaggggcaagagtgagactgggcttgtttgggatgaagatttctaggaggggccaggtgagaggctgaagctggatacggaggttggggtggacccagaggagcagggcttgagggagctggcacgtcagctgggggtgcgtctgggactcgtgtctttaattccctgggcttgaccctggcagccttccccgagacagcaaacaggagggctggaacaatcctacatgtcagcaaaggtctggattgctttgcaaggtatagaaagcctgcacatttggggcctcagaccatgtgtcctcacatccagagaaaagttctaattgcaggatggtattgaaatgaatggtcccttcctgaagccaagccagtccttcctgtaaaccataatttggccaaacctatgtgcggagggctatgagatgcttttcctctggattctgagggtcaaaacagtcccaatggttcaggatacactcaaggggagtacaagctgggggtggtgaggagaactggctgcccattctgaaagacagggaatagaggtgttcctcatttcccttccttcttttggcaaaaagctcagggtgtgatggggagggaaagcaagcatcttcacttcactttccacctcttacccctgcgccctggcaaccttggcaggtgccggccacaggtacaaatgcggtatgtacccatgaagcagggagaacctggagattaggaattaactgccctcacctatgtttccttttctccctgctgttgaaaaactttgagttccctgggcctttttatcccatgaggcatggcctccttctgtgggatggggttcagtcagcaggaattggtcctgtccatttacattgtgcctgttgcctggctttgaattcctcagacctgctttctctttctagggcctcagcctgaagcttggaattgagtttgggactgaaaaagcatttcagaggctgtttatatccatttagtgcctcaaataagccctgctgaatttgcaattatcagccagcaggggtcactcctctgttaacttccctattagaaacagagcggtggggattctcacttagaaaagaaaaaaagagaaaaacagttaaagaggcaaaaagtggggaatgctgggggaagaaccccttgcttagtgcaagtgggcccctctaatccttataactttcccatccttcccccagttcagaccaggttgaattccttggccatggaaggaaaggttccattgatgcagtgggtgagaagcactctgtagggtcctggctaccatcggttttctcacacccccctcatcccaggcagtggagggagacacttctgcgacattgctccccctgccccttcatggctattgggtgtggcctttgcctgctgcaggcatgcctaggtgctggagctgggagggaaaagggtaaggagaggtgccctggaagccgctcatgcctggggctgtcaaggtggaggcatacatggcacctctaggaaaaattggtctgatttgcacctttggcggctgagccaaatgctcattttacttagtaacattgcctcagcctgtagcaaaactcttaacattataaaggaagagataagatccatttcaaataatgtgtgagagagaaaagagatgaaaggaaaacagagtcttttacctgcaggaaagggagagaagtggcagagttttggaagaaaggcaggcccaacagtttcccattcactcacactcaccttccgagatcccagacgagccaccagttgaaatgggaaaagtttccttgtccccctcacaggaggtggagtgggggtgtggcttgcttctttagtactccgctgctcaaacctctagggaagcatacagactggcaagttgtggggctacaaccccatggcagcatctaggggtagatgtttacagctgctgaagccccagtggacatgtggtaccatgtgctcttttagttttgccatctataggtggctttgtggtaaccagctcaattagacccattccttaacccaaagacagagggctttctgtatcccgcggttgttacctaggtgtaccagaaaaatcaaatcacacgtggtcttggagaatgagtgcaaggttttattgagtggaagtagctctcagcagatgggggagccaaaagggagaatagttttcccctgaagtcgggttattcagcggcccaggctctcctctggctgccccagccaaactctatgtcaatccattggtcggtggcctgccagagtgctggtgcctgttggtggattcctctcagcgtcgagagtttttccctctcaggaaagggagagaagtggcagccacccatgtgttcttgcactgatgtgctcctctcgacgtccaacctcctgtgtgtctgcctgctagggtcccagagtttttttaggcacaggatagggcatggtgggccagggtgatcttgggaaatgcaacatttggtcaggaaaacaaaaatgcctgtcctcatctaggtccaggggcacaagcccaggtttggagccctagccagggaccccggcctcctctacccatcactttccttcaccttttctgtatcattcaaagggaccatgcccttcccttcccagcacttctcttctgtatcaataggtgatgtttttaaaatttcccaactctagtgcaggcatggtactagacatatacatagaaataaaaccacacttattcttctggctggcaagacatagtatttttgccaaattatgtgttgttttgaagcattttatgtacccctggtcatataaaaataaagctattttgttcagtacaaacagcagcattttctggattagaaagttaatcatcttaaaagatcatcacggatttttccattgcactcatcactaattgctttggcaaaaaatttcttatctcacgcatgacaaaatcagccgcagtatctcctagtaatttaatggtgatgatctttataaaggaaataagcacatcaagggaaaacataattttttttaaaaaaagagtaataaaactttttaaaagtcttttttaaaagactgcttttctaaaatagtaaaataaaactccaccaataaaaccaccaacaaaacagaaaagaaaaaataatgatatgatcggagctatttgatgaaagatggtaaattaaatttaaaatgattagaagagaaaaagcaatacctgtctcccgtaggtctcagtccaggttctgctatgcctttctcctggtgagccacctatttaagagtcgcttaaagcatatgttaatccaacaacagcagattaaaaaccaatgcaatctgaactatttgatctaaaaacataaataaaatttaaaacaaataaaagagaaaaagcagtacctgtgtcctgtaggtctcagtccaagatctgctctgactcccttgtggtgagttagccctttagaagtcacttggggtggggcatatgttaattccactaacattggttctggccaatgagtcaggaaggtggtaaatggcaccttttcttcttgctgatttctttcagttcctttggagtctggacattagtcctttgtcagatgcctagtttgtgactactgtttcctatactgtgggttgtgtgtttaccctgctgatatttcttctgccttgcagaagattttcggtttcattaggtcctattgatcttattctatttttatatttttgcgtttgcttttggggcattagtcatgactacttggcctaagccaatgtctagaaaagctttttggatgctatcttgtagcatttttagactttcaggtcttagatggaagtttttatatgctttgttaaagatcaggtgactgaaagtaccgggctttgtttctcggttctctattctgttccattgctctatgtgcctatttttatacttcctgcaccatttattgaataaagtgtcctttccccaattagtgtttttgcatactttgttgaagattagttgtctgtaagcatttggctttatttctgggttctctattctgttccattgctctatgtgcctatttttatacttcctgcaccatttattgaataaagtatcctttccccaattaatgtttttgtgtactttgttgaagattagttgtctgtaagcatttggctttatttctgggttctctattctgttctattgctctatgtgcatattttataccagtatcatgctattttggtgattgtagccttgtagtataatttaaagcctgccttcagatttgttctttttgcaaagtattgctttggatatgcggtcacgtttttggttttgtataaattttaggattcttttttctagttctgggaaggagaatgatgatattttgatgagaattctactgctctgtagatggctttggagagtatggtcactttcacaatattgattctacctattcataagcttataatgtgttcccatttgtttgtgtcaactgtgatttctttcagcactattttgtagttttccttgtaggaaacttacattaacctacttggttaagtatatttctaagtattttacttattaaaaattctcagggaaatgcaaagtaaaactgaggtgggaaattaaagaaaaataaaattaaaaagaaagggaaataagctttcttgtattaagctaacttgtcccagaggcagcaacaggcacagcccagacccaggaaaagtcttgataatattatttattgtattctggagactcttccagcactccttcaatgtagggagaagaaaaacaaattttcctttgttttatggtatgagtttatagattcttgttctctttaactagtaacttcaagtattctgttttatctaagaagtatggcaaaggtcatgagaagcctgagcaggcctgaactacagctctctaggcaccatagtgaagataaaccaatgcaagcctctttagagcaaaacctagataatagacatctgggttgcatagcaacagttatgtgcaatcctgagttatgaacctgttacaatttgattaactgtctttttcctgcctctgtatccctgctttcacaccactgtaagcttgcttcaagctggcccacccccttttgtgaagtgtgtataaaagtcaagtgctgtctttgttccaggccctgtctttggacgtgagtctgctgggcctgagagcactcaataaaagattctcctgttttaacccaaagcctctctctcatcctcctaaatcccacaacaaaaccacaatgagatgctatcttaatcttgctagaagcccataatttaaaagtcagaaaacaatagatgttggcatagatgtggtcaaaagggagcactttgacactgctagtgggaatttaaactagtccgaccactatggtaaacagtatggggattccttaaagaactaaaagtagaccattcattccagcaatcccattactggctatctacccaaaggaaaagaagttattccataaaaaagacacaagaatatggatgtttatagcagccgattcgcaattgcagtgatatgggaccaacttaagtgcccatcaacgaacgagtggataaagcaaatgtggtacaccatggaataatacttgataataaaaaggaacaaaataatgtcctttgcaacaagttggatggaactggaagccattattctaagtgaagtaactgaggaatggcaaatcaaatattgaatgttttcacttttaaatgagagttaagctatgagaatgcaaaggcataagaatgatataatggacttggggactcagggggaaaggttgggagggggatgaggaataaatgatgacatattgggtatattatacactgctcaggagacagatgcctcaaaatctcagaaattaccactaaggaacttttatccacataaccaaaaaccacatatattccacacactattgaaagaaacataaacattattttaaaaaataaagccacttttaaaattagcaaaataaaataaatatgtcttcagagtttagatattggatccaaattagacagatcaaatactgcctttactaaatattttcatgtcattaacaacttctaaaacctttcaaacagttttttgacatgtcttggaaccatccatttctagctaaggcctgggcacctgtgaaatagggccatgcccccccttatactgggaagagtaagatatttcaagactaagatgttttctacagctccatctttttctttaagctctacatcaaggacataattaaaattggttgtctcctaagtggtttactaaaaatgcatacttaagagttaccattataattaatatttgtatctaaagctacttaaaaattttcacacacaaatctgactgaacaagtaaaatatattttaagtcaaagtttataaaaggacatgagaacatagcttttatgaaaaaattagttttgtcaagtttagaggttttcaaatattttaaattcaggaaataaaataacaaaaagacaaaagaaaatggttgaacaacttagaaaaggtttgttaaaattcatcttataaaacaatctacatgtaaaaagtgggctaaaatttgaaagagattatttaggttttccataaattaatccagaaggggtaggaagtcttaagaatgaggaaggacaggaggaaggggaggtcatcctgacactgcagaggcagaagtgcagctgaaggtatgaaggctaagaggggaggggagtttgagtgctgctgcctggctgtcagagcagaggagggtcctgggcaccagacttgaggaagggatgaaaatgctgggcagacctgtagtgggcccttgagatggcagatagtggtttccagagagagggccattgttttccagtgcccagcactgagcagagagagttttgggcagtgtaaaaaaaaaaagagaacttacctctttctcgttttagaaaaagaacagtctaagaatatcagcagggaaactctcagtgcttcaaggggttaaacgcccttttggctttcttgtgttggtttcatcatagaggaggagaaacttcttggaagtgttcctaaaaacacaacacgtctgcttctcctttcaaaaaaggaagtgctaaaacacgaacactctagatccaaatattaatacggatgtctaaatgcttccgttttccaaggggcagaaagctaaaggttgtaacctattcatttcagtcaaagttggtgaaagggaagcaaaggaactgggtggggcttggaaggatgacgaagctcaagctcattggccagcaacctctctcctgggggcgggaggggtgagcatacgtcattgctttggcttctataaaatgaggaggactcaccgagtgtgaagagtccttctggtgattgcagctgagagcacactcacgacgttctgcaaggattctctgattatgattctgaagggaaaagcgatggaatggacagcagagattgtaattttctttatcttgaattacggaagaaagtatctaggacagaaatccacgacaagtccttggaaccagcagatctcttcgttcacggagacgttgacgtattctctattgaagaagattcttaccttcttactggacaaggttttgtcagttctgcgtgactggattgtccgggagactctgaggaaactgatgtcacatgtttttccaaagaagatgtttctggaaccaacaactgtgattgtggtttgaggacttctgagagttccagtacaggaaataagcagaacatcagctggaggctaaacggatccagacttcactcttcacttcccttcctattcagtctattgtgcctgctgactgagaagcttggctggtatgtgagcaaataaacggaactattcagaaggagatgttgacatattctgtattgaagaagatccttatcttctcacctgacaaggttttgtcagttctgtgtgactggattgtccggaagactctgaggaaactgatgtcacatgtttttccaaagaagatgtttctggaaccaacaactgtgattgtggtttgaggacgcctgggagttccggtatgcgaaataagcagaacatcagctggcggctgaagggatgcagcctccactcttcacttcccttgccattccatctattgtgtctgcctgactgagaagcttggctggtatgtgaggaaataaacggaattataaacaaggagattgtttctcatctacttcattctgttgtggcttttctattttggggttcagggtgtgtgacaaggaccaaggagatgaaaggtttcatgatggagaaagcccaggcaatcagattgaagagctatccacagggaatcttggctgctgaggggctgcaccctgcaacggactgaccatatgacagaaaagggttttaaaggctcaacttctggactgagaacccagagtaatttgggaacctcctctgtgaggagatatgaaagctgggaatcatgacatccctaggaatggaaggcacatttcctgatggaaggggtgctttggaaaacaggagcagagtagacacagcagccttgtggatacgggtgggcagcatgcatgggtgatgtgaacgtggagtgtttgtgatcgaaactcaaaatgtctgacaaagtgaaaacctagaaaccacaatgaggaggaagagtttgtgagggcaatcactctccccatgtgtgaaaatcgggggctcttaaaatctcatctggagaggtgcagtctaccaaactctgggactttagcctccccttttaaaaaaccgtgcatcaataccaacgtccgaaaccacagaaataacacctggcttgcatggagacaaggacaaaaagccgtcatgatgagttgttctgctcacttgctgcctctgttcagtgcacaggatattgtccacccactagcaggctactgcaagagaagtgtgcaatatgttccctatgtgccatatatgtgccatatggcccatatgacaactgagtcagaaaatatctgatgccctcagagttacactccacctggagcttgcccccagccatccaggacctaggctccctaccctgtccaattttctggtgttttgggggcttcattctctaaggtgtgcccactctttactcaaaccaaaacacccacatattcctgcccatgaacaaccaatcaaccacttctcagttccacatcctgctgttgggtctctagtggtgacactgtaactcccaggtcatagtggtgacactataacacctagctaaattgatgccttgtctctaggaggccatgggctcctgcaggtctcatctgactctctgtagccttccctgacaatgctcacaatacccaagccagagccacattgacagcaagctgctctcatcttacctttgccagacctggccactggaaaaggctgaccctcatcctgcaatgcctatacctccaacctttgtctcaagctggtgtcctggagggacttctaagcagaaaacagattcagactcccatcctctcctgaatggcctcatatccaattctcagaccctcagccttcattgtaaggacacttcatccatgcccttgagtattctgtctgcactgtgtattctgcaatagattctcctccctctgcgaccctcaactccttccgcagactttttgttttcttgatcatctaccatagtcttccactgggacactgccaagcccattctggagagtgagttgtgcaagtacactgccccccatctacctttcgggaggtgtatacacccttctttctcccaggtctggaggctttctattttcatcctgaggcatctccacctgctcttggattcttcaaattgacaaccaccagttaacaagaactatgtgtcaccaaatagccaaacaatggcaattacaaaaataaaattaatagctgtaacccccattagcaaggatacacaaatcaaatcagggatagtgggtgaggaagtctgcctaacattcaaggaaggattctgaagtgatacaaaatcattgcctttgctatctttagaatggacactttcagccaggcacagttgctcagcctgtaatcccagcactctgagagccccagttgggtggatcacttgaggccagcagcttgagaccaccctgggcaatgtgcagaaaccccaactctactaaaaatacaaaaatagccagttattgtggcacatgcctgtaatcccaactccttgggaggctgaggcacaagaatcacttgaatctgggagccagagtttgtaatgagcgaagatcatgccactgcactctagcctaggcattagagtgataatctgtctgtggaaaataaaaacattcctcttcaaagttttcttctttaaatcataaatgttggaattaatatatcctctttgaaactcactttcttcaagcttctttatttgatggtagtaaatctttgttaagctttatgaggcaagagtaatggaagaagcatattatatatatttatactctaacctcagtgcttgttctagcaagctcaggcatgcgtgaatgtgcccaggcatgttccagcccataccttatatcctttccttattgggaaatgctgttactcctataagcattcttgtaagcaacttcctctttttctttgtctccactatctttacctattgaggacagttttaggttcttagccagttggatgtagcatagactgtgaggtccaaccccagccaatggagatagcacacagcagtagcgacctcatgcttaacagataaatattcctgtctccctttgtttggggtgctctcagctgatgagcaacaccctttctaaagaaattaaagttgtcttgctgagaaaacttttggtctaaatgctgattcttccttgcagcactgaagaagaagcaattatttccaacactttctcatacacaaaaaaagaagaaggtggaagaaaactttcttgtgcaccctatccctcactcagaaagacaacagaaggctcctagtggcaagccctagaggattcatttcttttgggaaccctcttggctgggatactaggactcaggtcaaactcagcattttcagtgtgtgggaagtgtgcttgggtttcactgttacttccaataatgtgatttggtccttggggttcaccaaattttggtatggagtggtgaaccctgttaagtttaagtgtctataaaattaacaaagcaaaataaccattctgccccatggttcagagaccaaatattgtgtaggaaatgctttagcgagagaaacagagaagaataaaaaatgtcctcaagcgctgcattatttcttgttatcgtccagatcttagaggaaaggctttcattttccctcattcagtatgatattagctgtgcatctgtcatttatggcttttattatgttggggtatgttccctgtgtatgtagttttttcagggtttttgttatgaagtgatgttgaactttatcaaacgtttttcagtttcagttgaaacgatcatatgctttttgtccttcattctcttgatatgatgcatcatgttgatgatttccatatggtgcactgtccttgcatcctgggcatgaattccacttgatcatgacaaatgaatttttaatgcattcttgaattccgtttgctggtattttgttgaggatttttgcatcaatattcatcagagatattggcctgcagtttctttttttttcttttttctttgttttgttgtttgtttgtttgtttgttttgatgtgtctatgtctggttttggtatctgggtagtagtgttccatccccttttattttttagaataatttgaataagactggtgttggttctttaaatatttggtagaattccgaagtgaagtcattgggccccgggcttttctttagtggaaggctgtttattatggcttcaatctcgttacttattattggtctattcatgttttgaatttgttccttatttaatcttggtaggctgtgtgtatctaggaatttgtccatttcttttagattttcaaatttattggcacataattgcccattgtagcctctaatcgtcatttgagttcctgcagtaccaattataatgtctccttcttcatttttgattgtatttatttggatcctgcccctttttttcttacttaggctgcctaataatttcttaattttgttgaactttttcttttgtttgtctcgctctgccaccaggctggagtgtagtggtgtgatcttggctcactggaacctccgtctcccaggttcaagcaattctcctgcctcaccctcccaaatagctgggactacaggcaagtgccaccactcccagctaatttttgtatttttagtagacacgggttttcaccatgttggccaggatggtctcgatctcttgacttcataatccacctgcctcagcctcccaaagtgctgggattacaggcatgagccactgcgcccagcctaattttgtttaaattttcaagaaatcaacttcttctttcattgatttctgtattttttatttccattttatttatttaaactctaagctttattctatcttcttctcattttagctttggtatgcttattgcctctctagctctttaatgtgcattgttagattgtttatttgaagttcttcctctctacaccataagacgtaagcatgtcctcattatgtcataagatgtaaccacttacagctataaacttccttcttagttctgcttttgctgtatctcataggctttgttatgttgtgtttccattatcaattgtgtcagaaatttttcaatatttttcttaatttcttcattgagcaactgatcatttgggagcatatttttaaacttccatgtacttacatagtttccaaaatacctcttgtgatcaatttctagttttattccactatggttcaagaagatgcttgatattatttcaattttttttcacattttaagatgtgttttgtgacctaacatatggtctactttttttttttattaaactttaagttgtggggtacatgtgtagaccgtgcagttttgttacataggtatacacgtgccatggtggtttgctgctcccattaacctgtcatctacattaggtacttctcataatgctatccctcccctaacctccaccctctgacaggacctggtgtgtgatgttcccctccctgtgtccatgtgatctatttttgagaatgatccatgtggattagaatgctgtggaaaagactttggattcctaatatccagggagggagacgatgatattactttcaatatcacacgggtgtacacactctctgtgacattgttcctaatatccagtggaagagaggatgatataacacccagggagggagaggatgatattactcttaatattgcagggtgtgtacccatgcctatgatattgttcctaatatcaggagggggagaggatgatattactcagaatatggcagggggtgtacacacactctgtgacatggttcttaatatacaggggagaatgggacaatattactctcaatatcgcagggggcgtacaaccctgtgatttgttcctaatatacaaaaggggacagtatgatattgttcctaaaatcgcagaaggtgtacaacgccctgtgatattgttcctaatatccagggcgggagaggatgatattacccccaatatcacagggggtgtgcactttccctgttacattgttcctatgatccgagtggggggaaatgacattagtcccaatatcgcaggatgtgtacactactcccccatgatattgttcctaatatcaagggggagagaggaggatattactcccaatatcgcaagggaggtacatcctccatgcaatattgttcgtaatattcaggaggagagaggaagatattactctcaatatcgcagaaagtggacacccaccctgtgatgttcttcataatatccagggaagcagacgattatatgactttcaatatcgctgggagtgtacatcccttttgggatattgtttctaatatccaggaagggagaggattatattacttccagtattgcagccagtgtacacatttcttgtgatattgttcctaatatccagaaagggaaaggatgatattactcccaatattgcaggtggtgtacacccccctctgatattgttccttacatcaaggaaaagaaagaagaatattactcccaatatcgaagagagtgtacacccctcctgtgatattgtatttaatatccatggggaaagaggatgttgttactcccaatatcgcagggggtttacacccacactgtgatattgttcctaaaatccagtgaaggagaaaataatattgctcccaatattgcagggtgtatacaggccctcccccgttatattgctcctaatatccagcggtggagaggatattactttcaatttttgcagggagtgtgtaccccctctctgatatttttctaatatcaaggatgggaaaggatgccattactcccaatatcgcaggaggtgtacatgccctgtgatattgttcctaatatccagggaggtagaggatgatattactttcaatattgcaggggctgtacaccctctatgatgttgttattaatatttaggttgggagaaaatgatatttttcctaatatcctgggaaggaaaggatgatattactgtaaatattccagggagtgtacaccttcctaatattctaatattgttcctaatatccaggggtgggagaggattatattactcccaatatcgcagtgggtgtacacccctcctgtgatgttgtttctaatatccaagcgaggagaaaatgatatcactctcaataccgcagggggtgtacaccttccccatcatatcgttcctaatattcagagggaaagaagatgatgttactttcaatatcgcaggggttgtacacaacccctgtgatatttctcctaatatccaggaagaaagaggatgatattgctcccattatagcagacggtatacgcctccctgtaacattgtttctaatatcaagactgggagaggatgatatcacttccagtatcgcaaggggtgtacacctcccccgtgatattgttactaatatccagggggaagaggataatattactttcaatattgcaggggctgtacacccccgtgatattgttgttaatatttaggttgggagaaaatgatattagtccaaatatcgcagagagtgtacacacttccgataatattgttcttaatatccatgggggagacgatgatattacacccaatatcgcagggggtgtagtctccccttgtgatattgtccctaatattcagggaagtaaacgatgatgttagtgtgaatattccagggagtgtacaccccctttgtgatattgtcctaatatccgcaggagagaagataatattactcccaatatcgcagggggtgaacacaccccctgtgatattgtttctaatatccaagcgaggagaaaataatattactcccaatgtctcaggggatatacaccttccctatgatattgtttctaatattcaggtggaaaacgggtgatattactcctaatatccaggaagaaaggggattatgttactccccttatagcagggggtatacacctcccctgtaatattgttcctaatatcaaggctgggatatacgtggggggaaggatgatattactcccaatatcacaggggttataaaaccttctgtgatattgctcctaataaccatggcggaagaagatgatattactcctaatattgcaggaggtgtacactcccccattatgttgttcctagtatgcagaaaaggagaggatgacattattgccaatatcgcagggtgtgtacaccacccatgatattgttcctaatatttagagggacagaggatgatattactcccaatatcgcagggggtgtacacgcatcccctgtgatattgttcttgaaatcgaggggaaagagaattatatttctctaaatattgcagagggtgtacaccgccccctgtgatattgttcctaatagccgggggcggggggagataattaaattactttcaatatctcagagagtgtacatcccccttgtgacattgttcctaatatccagagcaaaagagaatgatattcctcccagtatcgcaggaagtgtacatttaacctgtaatattgtttctaatatccagggggaagagaatagtaatactcccaatatcgtaggggttgtacaccttttctgtgatattgttgcaaatatttagaagagagagagaatattactcgcaatatcacagggaatgtatacttcccctgtgatattgttctaatatctagaaaaagagaggataatattactcctaatattgcagggggtgtacacccccacttgtgatattgttcctaatataaaggaaggtcgaaaaacaaacggggagcccagggggaaggaaggcaggcgaggaagaggcagcgccggggcgccggagggagcagccgggccgcggaagcgcgagcacgagaccggtcgcggtcgcagtcgcatttttgccgttgtcgcggccgccgccgccgaggcttacccggggatgtctgagcccgcgcctcgcggcccccaagctccacgctgcgcccgctgtcccggcctctaagggccgccacgtccctgcggcgcgcgcaggcagaaagcggcttcgtgccggcggagggggcccgggcgggccgggaaaggctgccccaggccccgcgcctaccccatcaccgcggccggcgccgggccgggaggatgagcggtgtggggctctgaagcatggagggggttttgtacaagtggaccaactatctcacaggttggcagcctcgttggtttgttttagataatggaatcttatcctattatgattcacaagatgatgtttgcaaagggagcaaaggaagcataaagatggcagtttgtgaaattaaaggtgacagctttggaggggaccacccttgattggatacataaattctgttcattcagcagacaacacaagaatggaattaatcattcctggagagcagcatttctacatgaaggcagtgaacgcagctgaaagacagaggtggctggtcgctctggggagctccaaagcatgtttgactgatacaaggactaaaaacgaaaaagaaagaagtgaaaccagtgaatcgctgaaaaccaaaatgtctgaacttcgcctctactgtgacctcttaatgcagcaagttcatacgatacaggaatttgttcaccacgatgagaatcattcatctcctagtgcagagaacatcaatgaagcctcttctctgcttagtgccacgtgtaacacgttcatcacaacgcttgaggaatgtgtgaagatagccaatgccaggtttaaacctgagatgtttcaacggcaccatccggatcccttagtttctcctgtgtcaccttctcctgttcaaatgaggaagcgttctgtcagccaccctggttcttgcaccagggaggagtagccactgtataaaagaaccagtatctgcacttcaccgactctcccagcgacgccgaagaacctactcagatacagattcttgtagtgatattcctcttgaagacccagatagacctgttcactgttcaaaaaatacacttaatggagatttggcatcagcaaccattcctgaagaaagcagacttatggccaaaaaacaatctgaatcagaagatactcttccatccttctcttcctgaagaaactgtagtgtccaactttctctaagtattgctatgcaaaagctgctgtaattgaactattgttatagggagtagttttttcccttaggactctgcactttatagaatattgtaaaacagacaaacaagaaaacaaaccacatacttttgaagcgtgttttatctttatatagtttgtttgcaagagtattttcctaataacttcacagtatgaatgtgcatcttttttttctttttttaacaaatgatggtgtaacattttgacatccataaggacaaatgtagatatttttctaaaaaaccgtgaggggactgacagcttggtcagggtgtattgtagcttataaacatgaaatcttacaaggtttcagtttgacagaagtgtgatatatgtaacttgtgccatggaccaaatggtcactttaccacagctaaaaatgagttatgatagcagcttgatggtgattgcattgtattcctttaatcaaaaaggaaacgcaatattctaagtatctttagcccaaataccatgacatattgagcatctttaaataaccagactgtattgtccttcatatgtgaagttgacactactgatttgtcaataccaaattttgggttaaagtgtttaatttttatttatttattttcttgttgcctcaaaagatgattgcattctaacttttgtgacctaccaaatttaagatgtgtatacattgttctttacgttgttctagaaaagagattttaatgctgtagtgacttagctcacttacatcagagaaataaacaactttcaatggaaaaaaatatatataaaggaaggaagaggatgatattacttctcatatagaaggggttgtacaccccccttgtgatattgttcctaatattcagggagggagaggattatattactcccaatatagcagggagtgtacacccccccccccgtgataatgttcctaatattcagggaagcagaggatgatattactttcaatatcacagggggtgtgctgtccccctgttatattgttcttaatattcaggggggagaggatattattatgcccgatatcacaggagaagtacaccccacaagtgatattgttcctaatatccaggggtaaagaggatgatatcgcaggtggtgtacacccctccccgtgatattgtttctaatataaagaaggagagagcatgatattactcccaatatcgctggaggtctacaccccccttgtgatactgttcctaatatccaggaagggaaacaatgatattgctgtgaatattccagggggtgtacacccctttgtaatattgttcctcatatccagggggtagagaggatgatattactcccaatatcgcagggggtgcacggccccactgtgatattgtttttcatatccaggaggggagaggatgacattactctcaatatggcagggggcgaacaccccctgtgatattgtgctagttaggttgggagaaaatgatattactcccaatatcgcagggggtgtacaccgctcctgtgatattgttcctaatatccatgacgggagaggatattactcccaatatcgcagggggtgtacctctcccctgtgggattgttcacagtatccaaaagggaagaggatgatgttactcccaatatcacagggagtgtacaccaccattgtgatattgttcctaatagccagggaagaaaacgatgatattattgtgaatattacagggggtgtacacaccccctgtgatatggtttttaatatacaggttggaaaaggatgatattactcccaatatcacaaaaggtgtacacacccccccatgatattgttcttaatacttcggtggggagaaaatgatattagtctccatatcacaggggtgtgaactcctccggtgatattgtttttaatatcaagaggggaggagatgatattgctttcaatatcgctgggggtgtacatccctcctgtgatattgttccttatatccaggcgaggggaaaataatattactcccaatagtacacaccccatgtggtattgttcctaatactcagggggaaagaagataatattactttcaatatcacagggtttgtacacctttcctgtggtatagttttcaatatccagggggaaggtacatgatattactcccattgcagcaaggggtgtacacacctcctgtgatattgttcctaatatccagaagtggtgaggatgatattactcccagggggtgtacaccccacctatgatattgtttctaatatccaggggaaaagagtgtgatattatgcccaatatcgcagagggtgtacacttatcctgggatattgtttctagtatttggggagggaggagaggatgctattattctcaatatcgcagaaattgtacacccccgctgtgatattcttcataataatcagggaaaaagaggatgatattactaccaatattgcagggggttacacttcccctttggtagtgttcctaatatccaggaagaaagaggatgatattaatcccattttccaggaagtgtacacccaccgtgtcatgttgttcctaatatccagcagggaagaggatgatattactcccaatatcggagagggtgtacacttcccctgttatattgtttctaatacccagggggaagaaggatgacattactgccaatatcacagggtgtgtaccccaccctgctattgttcctaatattcaaaaggaaagatgaaaatattactcccaatatctcagggtgtgtacacctctcctgtgatatcgttcctaatatccacaggaagagagaatattactctcaatattgcaggggggtgtacacccccctgtgatattgttccaaatattcgggcggggagaggatgatattagtcccaatatcgcagggggtgtgcaccaacctgtgatattgttcctaatatccatgcgggggaggacgatatcactctcaatgtcgcaggaagtgtacacctctcttgttatatttttcttaatatccaggagggaaaagatgatattactgccaatatcgcagggtgtgtccaccccccttttatattgttcctaatatccaatggaaaagaggatgacattgctctccatatcccagaaggtgtacaacgcccctgtaatattgttcctaatattttgggggaagagaggatgatataacttataatatcacaggaggtgtacaccacccctatgtattgttcctaatatcctttaagggagaggatgatattactcccaatatctcaggtggtgcctattccccctgtgatattgtttttaatatccaggggaagagagtatgatattacgcccaatatcgcagggggcatacaccctctctgagatattgttcataatatatagagggagagaggatgatattacttccaatatcagaggtggggtacaccccccggttatattattcttgatatccaggaggggagaggttgatattactggatatatagcagggagtgttcacatcttctgtgatactgttcctaatatccagaaaagtagaggatgatattactcccaatatcgcagaacgtgtacacctccctgtgatattgatcctaacattcaaaggggagaggatgatattactcaaaacatcacagggcatgtacactcccctgtgatattgttcctagtatccagaagggagcaagataatattactttcaatatcgcagggggtgtacacccctctttggtatgtttcctaatatccagaaggaaagagggtgctattactttccatattgcaaggggtgtacacccccctgtggtatggttcataatatccagggagggaaagggtgctattattccccatatcgcgaggcatgtacaccctgctgcggtacggttcctaatatccagggggaaagaggatgctattacttcccatatcgcggggtgtgtacacccccgtgtggtatgttttgtaatctccgggaacgaagagggtgttattacccctcatatcgctggaaatgtacactcccctgtggtacggttcacaatatccaggggattgagggtgctattactccccatatcgcggggggagtgcacctccctgtggtatggttcgaaatatccagggtaagagagggtgctattattccccattttgcaggaggcgtacacccctctatggtatgttttgtaatatcccaggtaaggggtgctattgagagaagagagcaaaagaccccccccatattgttctgtattattttatactcagtacctgttttaagaagaaacaaggaagcgaaaccaaaggcaggcagcccggcgccaggcaccagatccaaaaccagacccgaaaccaggcctgggccttcctgaccttagcctgaaagttaaaattcaacccatgacctagcaactgatgttatccatagattccagacattgtatggaaggacattgtgaaatttcttgttctgttctgtttcactctgagtactggtgcatgcagcccttgtcacatacccactagattgctcaatcaatcatggccctttcatgtaaaaaccttagtgttgtgagcccttaaaaaggacagaaattgtgcactcaacaagcttggattttgatactctagtctgctgatgcttccagctgattaaaagccacttccttcactacctcggtgtctgtgggattttgtccgcggctcctcctgctacactgtgactccccttatagagaggggtgtacacccccctttggttcctaatatccagcgggggagtaggtgctattactccccatattgcggggagtgtacacccccttgtagtacggatcgtaaaatcaaggagggagagaaggtgtaattatccccatatcacagggagtgtacacccctttgtggtatagtttgtaatatccacgacgggagagaatgctattactccccatatcgtggagggtgtacaccgccctgtagtatggttcgtaatatccggaaggggagaggttgctattactccccatatggtgggaagtgtacacccccatgtgatatggttcataatatccaggggggtagaggatgatattacccacaatatcatagaaggtgcacacccttttgtgatattgtccataaaatccagaaggggagaggatgatattacttccaatatcacagggggtgtgtagccccatatgatattgtttgtaatatcaaggtagggagaggatgctattccttacaatagctcaaggggtgtaaccttcttgtgatattgtttgtaatatccagaaggggagaagataatttttttattttaaaagtaaactttaatgtcaaaaatgcaaacttgagaagggcagaaagatcaaacagaaggctgccacttcacaattggagggttgcacagtggccgggcagaggcgctcctcactccccagacggtgaggcagccgggcagaggtgctcctcacttccgagatgttgcaggagccgggcagaggtgctcctcacttcccagaacagggggctgccgggcagaggtgctcctcactgcccagacggtttgcaggcctggcagaggcactcctcacttcccaaacggagcagcggcaagccagaggcgctccacacttcccagatggtggggcagccgggcagaggcgatcctcacttctcagagggtagggcggcccagcagaggcgctcctcacttcccacatggtggggcggcaggctagaggcgatcctcacttcccagacggtggtgtggccatgcagaggtgctcctcacttcccagatggtgtggccgccgagctgaggcactcctcacttccctgacagtggggcggctgggcagaggcgctcctcacttcccagacacttggactccgggcagagactctcctcatttcccagatggtggggctgccgggcagaggcgctcctcacttcccagacggttcagaggccgggcagaggcgctctggggagaggataatgttactcccaatatcgcagggggtgcacactccctgtgatattgttccgaatatccagagggggaaaggatgatatagctcccaaaatcgtggggagtgtacacccccctgtgatcttgtttgtaataccaagaagaaaagagaatgctattatttccaatatagcagggggagtacaaccccctgtgatattgttcgtaatatctagggggagagaaaattatattagtcttaatatctcaggggacgttcatccccctgtaatattgttggtaatattcagaatggagaagatgatattgttcttaaaatacaggaaaaaatatgataatattacttccaatatcgaagggggtgtacactctcctgtgatattgttcccaatatccagaatgaaagaggatgctattactcccaatatcccagggagtgtacacccctttgccatattgttcataatatccaggggaagacaggataacattactcccaatatcaccgggggtgtccacccactagtgatatttattgttcatcatatccagaaaaggagaggatgatattactcccaatattgcaggtggtgtacggtccctgtgatattctttgaaatatctagaaaaggagaggatgatatcactccgagtatcacagggggtgtacacccccctgtgatattgttcgtaatatccaggggagaaaaggatgatataattgccaatatttcaggggatgtgcacctccctgtgatattgtttgtaatatccaggggtggagaggatgatattactcaaaataacgtaaacatcctgtgtgtacatcccctgtgatattgtttataatatccaggggggtagaagatgacattacccccaatatcacagagtgtacacacccctgggatactgttcataatatccaggcgggaaagaatgaactacttccaatatcgcaggatatgtacacccccctgtgatatatttcctaatatttatgtgggtaaggatattacccccaatatcacagaaggtgtacatcctctttgtgatattattcctaacatccaggaaaggagagaatgatattactcccagtatcgcagggggtgtacaccacccctgtgatattgttgctaatatccagggggagaggataatattactcccaaaatcacaggggacgtacactcctcctgagatattgttcctaatattcatggggaaaagaatgctactactccaaatacagcagagggtgtacaccatccccgtgatattgttttttatatccaaagggtgaaaggctgatattactcccaatatcgcagggggtgtacaggccccccatgatatcattcttaatatccagggaggcaaagaatgatgttactcccaatattgcaggctgtatacaccccccgtgatattgttcctaatatccagagtaagagaggatgacattgctcccaatattgcaggggttgcacgcacgccctgtgataatattactcccaatatcaacagtgggtgtacactcctcctgtgatattgtttgttatatctaagaaagaagaggatgatattactgtcaatatcacagaaggtgtacagccccttgtgatgttgtttctaatatccagcggtgagaggatggtattactcgcaatattgtagggggtgtccaacggccctgtgatattgtttctcatattcaaaaaggaaaagaataatataactccaaatatcgcagggtgtgtacacttccctgtgatattgatcctaatatccaggaagagagaggatgatattaatcccaatatcacagggggtgtacatcgcttctgtgatattcttcctaatatccagggggggaggggatgctattactcttaaaatcgcagggaacttacactcccactatgatatttttcctaatatccaggaagggagaaaatgatattactcctaatatcacatatcacaatgggtgtacatctccccgtgatattgtttctaatatcaaggatgggagaaaattatattactctcaatatcgcagggggtgtgcacacctcctgtgatattgttcctagtatccagcggaggagatgatattactttaaatattgtagaaggtgtacaacccccctttgatattgttcctaatatccagggggaaaggagatgatattactcctaatatcgcaggggctgtacaaccctatgtgatattgtttcttctaatatccaggggtggagaagataatattactcctaaaatcgaaggggacatacactccccctgtgatatttttcctaatatccagaaggaaagaggatgatattactcctaatattacaagaaatgtatacctgtcctgtgatattgttcctaatatccagaggggtaaatgattatattactcccaatatcgcaggggtgtacaccttccctgagatattgtttctaatatgcagtggaggagaggatggtattactcccaacatcacaggagatgtaaactccccttgtgatattcttcctaatgttcaggacgaaggagggtaatattactcactgtattgcagcagggggtgtagagccccctgtgatattgtttttaatattcaaggttggagaaaataatattccttccaatatcgcatggggtgtacacccttctttttatatagtttctaatatctggggggagaggatgatattactcccaatatcgcagggggattacacccccactgtgatattgtttttaatatccagggtgggagaggataatattactccaaatatcccagggctatacaccctccgtgtgatattgtttctaatatccagaggaagagaagatgatattactcccaatgtcacagggtgtgtacaggccttctttgatattgttcttaatatccatgagggagaggatgatattactcccaatatcgcaaagactgtacaccctttctgtgatattgcttccaatatccagggagggagaggatattacactcaggatcacagggggtgtacaccccaacctgtgatattgtttctaatatctagggaaaatgagggtgatattactatcaatatcacaggaggtgtacactcccttatgatattgttcctaatatccaggagaatgacaggataatattactcccaatatcgcgggtggtgtctccccccactccgtgatattgttcctaatacccagagggggagagaatcatattactcccaatatcgcaggggatgtacacctacatccggcggagtagaagataatattactcacaatatcgcaagaagtgttcaccttccctgttatattgttgctaatatccagggagtgagaagatgatattactttcaatactgagcgtgtacactacccctgtgatattgtttctcatatccagtagaggagaaaatcatgttactcccaatattgcaggggtgaacacctcctttgtgatatttttcctaatatcaggaaagggagagtatgatattacccttaatattgacaggggtgtacacccccctttgatattgttccaatatccaggggggcagaggataatattattcccaatatcgcagagggtgtacaccccccgtgatattgttcctaatatccagagaaataaaaaatagtattatttccaatatcacagggcgtacattttccctgtaattttgttcctaatatctggggggtggggtggcaggataatattactctcaatattggagagggtgtacacccccctgtgatattgttcctaatattcagggtgggagagaatgatgttactcccaatatctcaggagtcgtatacacccccttgtgatattttttctaatatccaggaggcagaggatgatattgctcccaatatcgcagggggtatacacccgagctgtgatattgtttctaatatgcaatatgggggaaggatgattttactttcaatatcgcagggaatgtacactttccttgtgattttgttcctaatatccaggggtggagaagatgctattactatattactcctcatatcgcaggcggtgtacaactccctgtgatatggttcagaatatccagagtgaaaaaggagggtgacattactcccaatatcgggggggtgtacacccctttgtgatgtggttggtaatatccaggggggcagatgagggtgatatcactccccatatcgtggaaggcgtccacttttttgtgatgtggttctttatatcccgaggggagaaggtgatattactccccatatcgcgaagggcatacacccccctgtgatatagctcataatattccggagagtggaggaagatactatgccctatatcgcgggtggcctacaaccccctatggtttggcttataatatccaggggggagagggtaatattgctccccatattgtggagacgtacagccccctgtgatatggtttgtaatatctttggggggcgagggtgatattactccccatatcgcggggagcatacacccccgtgatctggttcatagtatctcaaaggaagaagttgatgtgtacaacttaagggaaaaagttgaagtgaagtgtacacacgccctgtgacgtggttcataatatccaggcgggggagaggagagtgatatttactccccatatcgcgggtgttgtaaactcccctgtgatatagttcataatatccaggggagagaggagggtgatattgctcctcatatcgcgaagggtgtacaaccccctgtgatatggttcataatatccagaagggtagaggacgatgatattactccacatatcttgggaggtgtgatatggttcgtaatatccagcgatgagagaatgatattactccccatatcgcaaaaggtgtgatagggtttgtaatatcctgagggggagagggtgatattaatccctatattgcagaaggactacaccctcccatgacatggtttgtaatatcccagggggtagagtgtgatattactttccatatcacagggggtgtgatatgattcgtaatattcgaagggggagagggtgacactactctccatatcacggggtgtgtgatatggttcttaatatcccaggggttagaggttgatattaccccctttttggggggtgtgtacaccccctgtgatatggttcgtaatatcccgggggagacagggtgacattattccccatatcgaggggatcgtacaccccctgtggtgtggttcataatatccctagggggagatggtgatattactccccatatcagggggcgtgcactcttctgtggtataattagtaatatccagggggcagaggtcgatattcgtttccatatcatgaagggagtacacttccctgtgatatggttcctaatatccaggggggagagggtgatattattccccatattgcggggggacatacaacccctgtgatatggttcataataaccagaaaagaagagggtgatattaatccccgtattgcagagggcatacaccccccctgtgatatggtttgtaatatctaggggaggaaaaggtgatattactttccatattgctgggtgcagacacccctttatgatatggttcataatatccaagttggagagggtgatattacttcccatatcatgggaggtatacccttccctgtgatatggttcgtaatatccagaaggggagagattgatattactccccatattgtggggggcgtacaccttcctgtgatacggtttgtaatatctaggggatatagtgggtgatattactcaccatatcacgggggttgtaacatggtttgtaatatccaggggaggagagggtaatgttactccccatatctcggggcatgtacaccctcctgtgacatggttcgtaatatccaggtcgggagagggtgatattactcctcatattgccgggggtgtgttatggttcataatatcctggggaaggaggctgctatcactctccacatcttgggggatgtacactctcctgtgatatggttcataatatccagggtgggtgagggtaatattactccccatatcgcgggaagtgtacatacccctgtaatattgtttgtaatagaagagagggtgatattactccccacatcgcgggtggtgcccacccccctgtgatatggtttggaatatccagggggatgaggagggtgatattactccccatatctcggtgggagtacatccctctttgatcaagttcataatatccaaaaggaaacaggagagtgatattactccccatatcgccgggggtgtacacgggagggggagtacacccccggcgatatggtctgtaatatccagggaaggagaggagggtgatattactcaccatatcgcaggtggtctacatttacctgtgaaacagtttgtaatatccagggggggaaatgagaatgattttttttttttgagtctcactgtgtcacccaggttggagtgcagtggcacgatcttggctcactgcaacccccgcctcctggactcaagcaattctcctctcccagcctcctgaatagctgggactacaggcgcaccccacaacgtctggctaatttttgtatttttattagagacggggtttcaccatattggccaggctgatctcgaactcctgaccctgtgatccatccgcctcggcctccaaaagtgctgagattacagatgtgagccaccacgcatggcccaaggagaacgatattactccccatatcccagggggtgtatatccccctgtgatatggttcagaatatccggaaggaaagacagggatattacttcccatatcgcaaggggtgtgacatggttcgtaatatcccatgggggagagggtaatattactcttcgtattgtgaagggcatacactcccctgtgatacagttcataatattccggggagtagaggaagatattatgctccatatcgcgggtggcataagccccctgtggtttggttcataatatccagggaggagagggtaatattactccccatattgtggggacgtacaccctcctgtgatatggtttgtaatatcccagaggggagagagtgatattactccccatattgcagggacatacacccccctgtgatatggttcaaaatgtcttttttttttgaaggactggttctttatttcaaaaagacacttgtcaatattcattatcaaaacagttgcactattgatttctctttctcccaatcggccccaagtagaccacatcaaaggagagtacatattaagccaataagctgtaggatgtacacctaacagacctcctagaaaccttaccagaaaatggggacagggtagggaaagaaactttaaaagatcaacaaactgccagcccacggactgcaggggctgtcacagccagatggggtggccagggtgccacaaacccaaagaagcaaagtttcaaaataatataaaatttaaaaagttttgtacataagctattcaagatttctccagcactgactgatacaaagcacaatgagatggcacttgtagagacagcagcttcaaactcagaaaagggtaatgagatgagtttcacatggctaaatcagtggcaaaaacacaatcttctttctttctttctttctttcaaggaggcaagaaaagcaattaagtgctcacctcaacataaggggaacatgatccattctgtaagcagttgggagggggtagagatggaacaaaattttggtctcagaggtcttgccatcttaatttggtcacttctaatgaaaaaaataaaaaatagaaataacattatccaaaggtatcttaaagctgaaaacttgaacagcacattttttgttgttgttgtttggctaactcctcctggaaccacctttctggcttagctagtactttgtacagagcaatgaggcttcccatagtggagtctccctgggctctgtttggctctcagcaaggcaggcctataccttttcctctcctccatggagagaggaatatgcattaaggtgaaaaatcaccttccaaaagtgagaaagggattcgatcgctgcttcagggctgtggtattatatggaatgttttacaaaaggttgctacaaaacaacaaaagaggtaattacaaaatgtgtacatcacaacatactttttaaagacattatgcattgtgctcacattcccttaaatgttgtttccaaaggtgctcagcctctagcccagctggaatctccgggaagaggcggacagtttggtgaaaaagacacagggaaggagcgggcggcggaaggagggggcggcgaaaggagaaagcagccttccagttaaagatcagccctcaattaaaggtcagcttcgggcaggctggcctcaggcggagtctggttcagagggaggagcagcagcagggtgagactgaggcgttctacatctcattcaggtcaagcagagtctggtccagcatcctttgtgtacagaggtgctcccctttggtgcatttcagtttatcttccaagtcatcaattgtcttttccagcttggctaccgatctctcagcaaactcagcatgggtctccgcctcctttattttatcagtaagaatcttgatctcttcctcatatttgtcttctttttgagagtacttttcttcagcagcactcagacacttcaggttctggtccatcagtctaatctgctcatccatctctcggcaaagggattctgccagctcagctcgttcctctgtgcgttccaagtctccttcaatgatcaccaacttacgagccacctcttcatacttcctatctgcctcttctgcaatgtgcttagcttctctgagttggatttcctggagttccatcttttcttcatcttttaaggcccggttttcaataaccttcttacctctctcactctcatcagcagctttttccgcttcttccagcttttgcagggcagtagccaggtgctcctgagcacggtccagctcctcttcaaccagctggatcccacgttcaaggaggccacctcagcctcagcctgttcccgggcccacctttctccctcaacttctcgctggaggcgctcagctcgctcctctgcatcatctgcctgctgctgcagaacctggatcttgcgcttcaccgcctcgatggtggtgatcccagccatggtgcccacccagctactgctagagctccggttcctgcctcctccgatcggcgttgcagcctcctctcacccttacttccgcctcggttcaaaatatcttaagggaaggagttgatattactccccacatcacgggaagtttacatcccctggtgatatggtttgtaatatcccagggtggatagggtgatattactctccatatcgcgaaggagtactcccccctgtgatatggttcataatatccttggggggagagtgtgatattactccccatatcgcgagggccatatactcctttgtgacatggttcgaaatatcccggtgggggagggggtagagggtaatattactccccatacagcgaagagcatacgcccttctgtggcaaggttagtaatacttcagggaaaagagtgcaatattacttttcatattgcagggaacatacactcccctgtgacatggttcgtaatatcccgggggctgagagggtgatatttctccccatatcaccgggggcctacacctgggtgtgatatggctcataatatacagggagggagagggtgatattactccacataccgagtgaggggttacacaccctcgtgacatgttcgaaataccccaaggaggagacaatgatattactttccctgtcgcgggggctacaccctcccagtgatatggttcacaatatcccggggtggagagggtgatattactccctatatcaccggggggtgtacacttccctgggaaatggtttacagtatccccggggggagagggtactattactccccatatcacgttacatatcagggtacacccccacgtgatatggtttgtaacatcccaggaggaagaaaatgatattactccccatatcgcggtggcatacacccctccccgttaaatggttcataatatcttggggtggagagggtgatattactccccatatcacgtggggcatacaccccactatgatatggttcataatatcccggaggggagagggagatattactctccatgtcgcggggggcatatacacccctgtgatatggtttgtgatatcccgggggcggagagggagatattactctccatatcgtggggtcgtacacttttctgtgatatgattcgtaatatccagacggggagagggtgatattacttcccatattgcgggggcgtacacccctctgtgatatggttcataatatcccgaagaaaagagggtgatattactcctcatatcgcggggaacacacaccaccctgtgatatggtttgtaatattcagcgggggagagagtaatattactccctgtatctcggatggcgtacactcccctgtgatatggttcataatatccagaagaaaagagggtgatattactccccatattccagggaatgtacaccaccctttgaatatggttcgtaatatccaggaggggagagggtaatattgctcccaatatcgaaggaggtgttatacggttagtaatatccagagaaggagagggtgacattactccccacatcgtggtgggtgtgcacccacctgtgatatggttcataatattcaggttaagagaggtgatattgctttccatatcgccaagggtgtacactcccgtgaaatacagttcgtaatatccaaaaggggagagggtgatattactcccatatcgtggggggtgtacacccctctgtgatatggttcataatatccagggtggaataaggtggtattactccctgtatctcggggcatgtacatcgcctgtgatatgattcataatatccagaagaagagagggtgatattaatctccatattgctgggggtgtacaaccccctgttgtatggtttgttacactgagttggggagagggttacattactctcaatatcgagtggggcatacacacttatgtgatatggttcataatatcccagggaggagagggtgatattactccccatatcgcgggaggcatacaccccaatgtgatatggtttgtaatatctacatttttttttttgagacgaagtctcgctcttgtcccccaggctggagtatgatggccggatctcggctcactgcaacctcagcctcccgggttcaagcgattctcctgccttggtcccccaagaagttgggattacaggcgcacaccaccacgcccggctactttttgtatttttagtagagaaggggtttcaccatgttggccaggctggtctagaactcctgacctcagatgatccacctgcctcggcctcccaaagtgctgggattacaggcgtgagccactgcacctggcctggtttgtaatatctatgaagggggaaggtgatattactttccatatcacgggaggcgtacaccacgatgtgatatggtttgtaatatccagggggtatactgggtgatattactccccatatcgcggggagtgtatacccttttgtgatatggttcctaatattaagctgaggagaaggtaatattactccccatatcgcaggggtttttatatggttcataatattcaggaagagagagggtgacattactctccatatcacggggtgtgtactcccccatgtgatatggtttgtaatatccagggaaggagaggttaatattactccccatatcgcagggggtgtacacctctctgtggtttgtaatatccaaagggaagaggatgatattatcttcaatatcttggggggatacagtccccagtgatattgttcataatatccagagggggaggggatgatattactcccaatattgcaggtggtgtacaaccccctgtgatattctttataatatagagggggatgatgatattactcccaatatagtaaacaacctgtgtgtacaccccctgtgatattgtttataatatccaagggtggaaaggatgatattactcctcatatcgcagggggtgtatacccctctgtgacattgttcctaatattcaggggaggagaagatgatactactcctcatatcacaggggatgtacacccccctgtgatacttttggtaatatccaggggaggagaaaattatattattccccatgtcacagagggtgtacaccccgctgtgatagtgttcataatatccaggtgaaaagaggatgatattactccgaatatctcaggaagtgtacacccttctgtgatattgttcataatatccaaaggtggagaggaggatactactccccatatcgcagtgggtgtacacccccctgtgatatggttcataatatccaatgtaggagaggatgatattactttccatatcgcggagagtgtacatccccctgttatattgtttgtaatattcagggagaaagaggatactactactccccatatcacacggggtgtatattcccctgtgatatggttcctgatatccaagagatattataatcctctcttggattatgctacctctcatatcgcatggggtgtacacacactttgtgatatcgtttgtcatatccaaggagggagaggattatattaatcccaagatcacggggggtgtacaccctcctgtgatattgtttgtaatattaaggggggagaggataatattactcccaatataattaacaccctgtgtgtactcctccttgtaatattgttcataatatccaatgggggagacgatgatattactttcaatatcgcagaggatgtacatccctttgtaacaatgtttgtaatataaaaggcaagagaggatgatactacttccaaaattgcaggacatgtacaccccccggtgatattgttcctaatatccagtggggaagaggatgatagtagtcccaatatcgcaaagggtgtacacaccccctgggatattgttcctaatataaaaggaggagaggatgctattattcccaatatcacagaaggtgtaaaatcccctgtgatattgttcgtaatattcaggaggggagaggattatattactcccaatatcacagggtgtgtacacagggaggggcaagggccagaagcgggcgggaatccccatgtttgggcggacccagtttctaatggccagcatttgccaatcaaagcttaccagagaactctaaaagccagggctttcctgctagacaagactcatttctggaactgctttaaaaagaaacaaaacttcccaaggaccccttttcctctctgtctgcctaaaataatgttttaaaaactcctaaagcagctgaattcagcccccttcctgggggaatgtatagacggaactcccacctttcccggcatcccaaggccagagtatgtgaaactcctgggtctctatgtgtgtctgagcggctgctctgccaacactccacacagccctgtgtcctggacccaaggcccttatgacctgagctcaagaggggatctcctgatccatgggttgcaaagatccatgggagaagcatggtttctggggcggggtcacacgctcagtcactgtttccctcggatgccggagatggttcctttggctctctgccaatacagggtgaatcatcatccatccctcttttctttgttctcccgggtcaagttgtttgcctagtcagtcccaatgtgagaacctgaatatttcagttgacgcgctgacttcaaaatccccgggcttcgggaggcggagcttgcagtgagccgagatcccgccactgcactccagcctgggcgacagagcgagactccgtctcaaaaaaaaaaaaaaaaaaaaaaaaaaaaaagtccccgggcttttcttttcactcagtggaaggcagctgcttctaattggccatcttggcccgcccccaccacgtgaccttctgtaaaatgcctccactctccaggaacgctctcattatataactttgcctgaaaccaacagcacgctcattgcacatatcatgggctcatttatttcacttataaagaacctggccaaggaagagatagtgcctaaagtggccagtattctgaccgatatgttagaaaaatggtgtgccgaccaattcatgacatgtgtcccaaaactagcaacggaaattgtattcgccgtgttgaggtctctaatccagatgatgctcatctatgtactggaaaaggcagagtcctttcctgacaagctgctgaaactcttcagaaacatctcatatttcctgaagaagatgatgtctggacaagcagcacaggtcgttcagatttaactttctattcatatatccagcacgatattcgcacaattgtcacgaaaccttaccagttgatgagtcctgcacatttcctttaatttcaggaggaagagggtaatccggatgagttttctgacctactctgctgctgtgattaaacaaccaccaggaaattttgacgacactgttctcctgagctcctccctttcctccgggaacaaaacaattgaatttacaaaaataaagtgttatttgactggagtgaggtctcatgtctgcttatgcggtggctcgctgctcagaacagggtgagtctctgggttgtgtgctgaggaggggaggctctcaatctggagaaaacccactgcaggggacacctccatggggtctgagggactgaggatgaggagccggactgggtctagggaaggaggaggtttcagagggtgaaattctggcactaaagcctgggggtgtttgggaacttcctccttccgaagaagtttcagggagggataaagacaaaccctgggctccttgaggggcccttactaatttgagaggactctatcgggaaggagagtgacaatggcctccttgaggactgaggcccctgaataaatgaggcccagatacagtccatgggggatgagaccttcaagggtcacattttggttgggacagaggaaaagtgcagctctgcagccgcagaggaaaacccggcagtgtgaaagcgaccttggaggggccctgtgcgctctgaatgcgtctgagcccccatcccctgtccccgcctctctttctggattcttccagctcggctgtctccgccatcttctgagcgctccaccctgacttattcaagtttcccttctgccttccaagtactccaaaatctttcagatctgtgtccctacccctgtttttagcatgtgttggggctccaggtccctgaaggtttctggcctgaaatccacctccccagcggagtggactgcgttctagagactccacactccgcgaggttcccaggcccctgagggacaaccgagtggcctgcgcacttcagggctccacactcggcaaggtctttcaagcccttggggtccccttcttagttttttccacctttctgggctgcagtcactccataaatgctgggatctgatccccacccccactctcgtttcctcaattctgcgggctacacgctctggcaaggtcctccgggccctggatcccctccctctccctatgcccacgctcctagtcagcccttctggggtccactattttcaggaactaaccgttctcatggagccttgctaaccggaaagctgtgtggaagaaaggctttgaggatagaggtggagatttggctcttccatagtgccactcacccaccccaccatgctgccactgccagacccggacccctgtttcagaacaagtgaccagattcgctcctggacagccctggacactggccttttctctgaaaactactcaccctttctctagtccccacttcatgccagcctcataccctcttccttcccccacgctggcttccgggatcctcctctgctcagacaacctcttctgtgtcccacccccgtttttagaatgctttggggcaccaggttgggggaaggtttctggcctgatatccatctctttccaaactcccttcttcccttgaaaggcttcttgccttcagccccacttctggctccgaggtttcaggacaccctcctcttcatcctcattcttttgaccaccagctttttaggaattcgaacgtccctctcatcttcgtgaatcctgtccaggcatttgttgaccccttcatctgatacccctgacctcacattgccaaaagtctacccctacccagtacactggaattagacaaaatcccaggagttttacctcaactctgagtgtgcccacaggagctctccctgaagccacgtccttttaagcagggtctagggttcctcccttgtcttaatgaactctttgtcacacggaggacgttatggagcccttatgatctttcactgcctttctgcccagcgttttgtctttccatggacatttataatattttccatggacattttgttctctcaatgtccacccctaatttccaacatcccaaagattctcatgtgtttcctgaaagccatttacaggaatggctgtgcccagacccccttccccaggatcctccttcacacctggtaggtgcctctcctagagagatttgcactcagttgtcgtgcagtcacatggcccagatggttgttaatcacccccttcctggcaacagctagcagccagggaatcactggcacagaaacctcagggtgaccaagatgaggccacctctgtgctgaaggctgtgctccagagcctgcttgggatcaggcttaagcaggtcttcagccagacctgatgttacctggtttccttgagctgccctgcctgagctatcgggagcactccctcaatgcacatcttgattccctatctcatgctctgcttctagaaaccatgagctatcaattgctactggcaatggtcctgggaagtcaaccctaagtatggattctggggttggatgactccccacaggacttcagtgagcaacaatcactgctggcagttggaggacagagtcgctagggcatgtgaccactgtgaaaccaccgatgtttcacctggggtaattttggatgaactacggtagaagcactgaaggtacattgcttttggtttggaagattgtaggtaaataatagcgatatgaatgtggaattggatggctgcaaacgagtgccattgatgcattgaaagaggaaaagtcaggctgtcacctgtcactcagcaatttaaagtgtgagagttgggactagatgtggtggctcacatctataatccagagattcgggggaagcttgaagaggtaggatcttttgagtccaggagttccagaccagcctggacaccagagcaagacctcatctctacaacaaaattttcttaaaaattagatgggcttggtggcacgcacctgtacttgtagatctagctaatggggagcatgagataaaaaaatcacctgagtcagggacttaggggttacaatgaggtatgattgtgccagtgcacacactcccacctggccaacagagtgagattctgcttccaaaaaaataagaaataaatcaggtttgagagttggaaagcatcatcttctcctagagccaaaggacatgtacaactgagacccaggaacaaagcttcatcacaaagagaccatcatcagtggagccgggagatgcattccccctcaccctgccttgaggaggcagtggagtcatctgtctgggatcctttctgacccagccctatttgtttgtctctttggcttctttggatttgtatattttagctgttataacactgtaaaacaaacagagtgatttttttgagttgtgtgaatgatgctagctccatagtcaccctgagagtgatgggaacttttgaatttgtggcaagttggagggtagtgtaagtgacctgagattgccaaattggggctagcactggatgtgaggttaggctagtggaaaaatatgcccagaaccagaggagtgtgggctcactgcaggtggttaggctcagatccaaattgtacagatggatagctttggggtaaagaataacatagttgagaagtgcatgtgttagtctgttcatgcactgctataaagaattacctgagactgggtaattatttataaaactcaggtttaattgggtcatggttccacaggctgtacaaaaagtatgatgctggccatcagctcaacttctggggaggccccagaatagttagagtcatggcaaaaagtacaagggaagcaggctcatcttccacggccagagctggagcaagtggtaggagaggtgatacacactttcaaacaagtaggtcttttgagaactccatcaccggacagcacctatgggatggtgctaaattattcatgaaatatccgcctccataatccactcaactgtcaccagcgcagccagccccacctccaacagtggggattacaattccatatgaggtgtgggtggggacacagctccaacctcaatcagtgggcatcctggattgggtctactatagaaggagaaccaggagctgactatgatcttgaaccctacccatgatggccgggcggggtgactcatgcctgtaaccccagcactttgggaggctgaggtgggtggatcgcctgaagtcaggagttagagaccagcctggccaacatggtgaaaacctgtctctactaaaaatacaaaaaattagaccggcgttgtgctggatgcctgtaatcacaccactacgctccagcatgggaaaaaataccaaaacttcgtctcaaaaaaaaaaaaaaaaaaaaaaaaaaaaagactgcccatgaccactgcaccagtgagagggacaccagcatcactgagatgcaagggctggacattcttcataggtcagagctcaaagcaggggacactgatacagagatgggctccatccatagcaccaaagtggtgagaggatgtgggaatggcagaggccagcactttgccatcaatgcaagggggtataaggaggtgacaccagtgccagagtacatcacggggggactgccctacaatatctaggacttacctcttagagcgtgtttcattagcgacaacagatataaatggcagacaggtgtgtccctgcattaacaggaaatagaaatcatcaagaggaacagaaggcagatgtcagcagccccttagaaagtcatcatccttcatacagttaaaatctgagacagttctcacacgagaaggcctaactcaaaaagaggctgggttctcatgaggcaggtttatgcaaaaccaaggaaggtgtacaagtttggaattctccagtttcccttggaaaagacctacagtcatttgcttaggtaactgagcactgaacaaaggtgagtattgttgtcttttagaagctcttggccaagaaggccttgttggcataaaacccatggtttggaaacatcaccatgacccctgttagagtaatggcctaagggtgggggtcaggaaattgatgtattccttgccaacttctgcctctaagtgagtgaactctgtttgtgaacctctctcctctgtggttatgttcctaggctctcatgtataatcaggagtcatagacttagaaacaggaaaaatacttacagtgtttttgtggcctgtgagctatgacttataattttaggaaaaaaacaattgcaaatggaaagcctaagtctatcaatgctcatccaagacaacataatcaataaaaaccaatatcaaatctcaaggcaaattatttcctgtatatagatggcagagatgagcaccaccatcaaaaactcaaggaccagtgctgtgggtccagtcatctgtttcatggaattcaccagtctggtatcttcaaaatccagaaggatgatggcagatggcaggaaagtaatgcaaacgtcatcaggtgtgaccccactgtagcagctgtgatggatgttttctctcaccatagcaataaataacacaacctcggtcacactgtatgcattgttggtctgcaaaatccatgttttgcaaaactcttcaggaaggtggatctgtaatattggcattgacatgagaacaacagcagtatttattcacaatctcaagctctctgtcttcccgtctctctcattagccatccaagtagtcctgaggaaccaagcccatcagaacattctgcaacataatacacagctccattctccattcaaattttgttgttgttgttgttgttgatgagacaacatcttactccatcagccaggctgacgtacagtggggctatctgggctgactgtagtcttgagcttccaggctcaaggcatcctctcacctcagcctcctaagtggcttgaactacagacacacagcgacatgctgggctagtttttgtatattttgtagagacgtgctctcaccatgttattcaggctggactcaaactcctgagcgtaagtgatccaagcaccttggcctcaaagtgctgagattacaagcctgagccactgcacccagcccaatctccattctactgataacaatgtcattaccaggtctgatggacaggaaatggtaaggtttctgaaaacctaaggatcacacagcgagttccaaaggctgaaagtgcatacctgtcgacactgataccaatgacatccaatggtgagaatgacattccttgtagtcctagctctgctcataacaaatctatactgaagtgtaagagtttgatggtcatggggattttccatgtctctgcctttcagcgatgtgccatatctgtgaagtgttcagaaatgcaacagcctgaggcatgctgggcatatcctctaataaaaaggaaaatgccattttatggtcctgtatttctacaagttggaacacatgggcctgtgatccagatgggggaaatgggaatattcccactcattcaccttcatccacgaagcccatttgaaagctttgggcttcccatccttgtagattttagtgttgtgggctgggtgcagtggctttcacctgtactgccaacactttgggaggcctagacaggtgaatccactgaggccaaaagttcgagaccagcctggccaagatggtgaaaccccgtccctactaaaaatacaaaaattagcaaggtattggggccagcacctgtaatcccagctgctcgggaggctgaggctggagaatcgcttgaacccaaaaggcagagactgcagtgacccgatcctgcctttgcactccacctgggcaagcagaacaaaacttctgtcttgaaaaaaaaaacaaaaaacgaacaaaaaagatgttagagttctgggtttagaggtctataccccagaaagagaatggtttcaacaagggacaaagaagttgctttaaacgttgacttgccatttcttttcagtgtgtttgttctcttgcgtcaagagaccaccagaaaagtggtgcaattactctcctgtcaagaatcattgactatcatctgcaagagggtcagatcctggtatataattagggcagaaatacttagtctgagaagggtatgacatccagaggccctattaatgatgtccttttctccatgcctgactctgaccccatgtgctggactgcccctgtgtggatggcctcatggcctgctcggactctgaggtcccaccccaagtggcacctccatggagggctctactcttgtatgggctctgacactcacactgagacactctcccatggacacctcttcacccacttggggtctgaaactgggctactccatccctccctaacctggaacagagagctttcactgctattacacaagtcatagaggctaactcctcatttttccaagctaattattgaaacattagtcctgggttgataagacaagataagttaacttttcataaatttgcttatcaagttttgaataaattcaaataaattcaccttccccacacaccttagttgtcgacatcacacgcgcacccatactcacagggtgagcacgaaggcttcactgtcagtggagaaagtggcaaaacccttctgtgcctcatcctggtctagacctggccctcatcctttcccactcttcccctcactcccttggattcatccacactggcctcctgcctgctgctccacctccctgcgaagctcacccctgcctcagggcctttgcacgtgcagtggcttcaagccatatcctcttcacccagatctcccagatctcctgaatgatcttcttttatcattcaggtctcagcttgcatgtaatcttctcagtgaggattacccaaaccacatagttcattcattcattcaaatattcattcaatggcatattgacaaagcagctacttcatgccaggccttgggccaggtgttatggatatggcaacaaacaaaacaagagttttctgctctcaaatttttacccacttaaaggagatatcatacatcatctgtaaataaatacatcatctgtaaataatgatgtaaataaatacatcatctgtaaatctgtaaataatgatgtaaataaatacatcatctgtaaataaataaagtataataaaagaaaatagtaggtttttttggttggaggtgaccgtgaagtttgcaaataccatcttacaacacattattttattttatttcatttcatttttaattttattattattatactttaagttttagggtacatgtgcacaacgtgcagatttgttacatatgtatacatgtgtgaagttggtgtgctgcacccattaactcgtcatttagcattaggtatatctcctaatgctatccttcccccctcccccaccccacaacagtccccggtgtgtgatgttccccttcctgtgtccatgtgttctcattgttcagttcccccctatgagtgagaacatgcggtatttggttttttgtccttgtgatagtttgctgagaatgatggtttccagcttcatccatgtccctacaaaggacacgaactcatcattttttatggctgcatagtattccatggtgtatatgtgccacattttcttcatccagtctatcattgttggatatttgggttggttccaagtctttgctattgtgaagagtgccgcaataaacatacgtgtgcgtgtgtctttatagcagcatgatttataatcctttgggtatatacccagtaatgggatggctgggtcaaatggtatttctagctctagatcactgaggaatcgccacactgacttccacagtggttgaactagtttacagtcccaccaacagtgtaaaagtgttcctatttctccacatcctctccagcacctgttgtttcctgactttttaatgatcgccattctaactggtgtgagatggtatctcactgtggctttgatttgcatttctctgatggccagtgatgatgagcatttcttcatgtgttttttggctgcataaatgtcttcttttgagaaatgtctgttcatatccttcacccactttttgatggggttgtttgtttttttcttgtaaatttgtttgagttcattgtagattctggatattagccctttgtcagatgagtaggttgtgaaaattttctcccattctgcaggttacctgttcactctgatggtagtttcttttgctgtgcagaagctctttagtttaattagatcccatttgtcaattttggcttttgttgccattgcttttggtgttttagacatgaagtccttgcccgtgcctatgacctgaatggaaatgcctgggttttcttctagggtttttatggtttgaggtctaacatgtaagtctttaatccatcttgaattaatttttgtataaggtgtaaggaagggatccagtttcacctttctacatatggctagcctgttttcccagaaccatttattaaatagggaatcctttccccacttcttgtttttgtcaggtgtgtcaaagatcagatagttgtagatatgtgacattatttctgaggactctgttctgttgcattggtctatatctctgttttggtaccagtaccatgctgttttggttactgtagccttgtagtatagtttgaagtcaggtagcatgatgcctccagctttgctcttttggcttaggattgactttgcaatgcggggtcttttttggttccatgtgaactttaaagtagttttttccaattctgtgaagaaagtcattggtagcttgatggggatggcattgaatctataaattaccttgggcagtatggccattttcacgatattgattcttcctacccatgagcatggaatgttcttccatttgtttgtatcctcttttatttcattgagcagtggttttagttctccttgaagaggtccttcacatcccttgtaagttgggttcctaggtattttattccctttgaagcaattgtgaatgggagttcactcatgatttggctctctgtttgtctgttattggtgtataagaatgcttgtgatttttgtacattgattttgtatcctgagactttgctgaagttgcttatcagcttaaggagattttgggctgagacaatgggttttctagatatacaatcatgtcgtctgcaaacagggacaatttgacttcctcttttcctaattgaataccctttatttccttctcctgcctaattgccctggccagaacttccaacactatgttgaataggagtggtgagagagggcatccctgtcttgtgccagttttcaaagggaatgcttccagtttttgcccattcagtatgatattggctgtgggtttgtcatagatagctcttattattttgagatatgtcccatcaatacctaattattgagagttttcagcatgaagggttgttgaattttgtcaaaggccttttctgcatctattgagataatcatgtggtttttgtctttgggtctgtttatatgctggattacatttattgatttgcatatattgaaccagccttgcatcccagggatgaagcccacttgatcatggtggataagctttttgatgtgctgctggattcggtttgccagtattttactgaggacttttgcatcaatgttcatcaaggatattggtctaaaattctcttttttggttgtgtctctgcctggctttggtatcaggatgatgctggcctcataaaatgagttagggaggattccctctttttctattgattggaatagtttcaggaggaatggtaccagttcctccttgtacctctggtagaattgggctgtgaatccatctggtcctggactgtttttggttggtaagctattgattattgccacaatttcagatcctgttattgctctattcagagattcaacttcttcctggtttagtcttgggaaggtgtatgtgtccaggaatttatccatttcttctagattttctagtttatttgcgtagaggtgtttgtagtattctctgatggtagtttgtatttctgtgggatcagtggtgatatcacctttatcattttttattgcatctatttgattcttctctctttttttctttattagtcttgctaccggtctatcaattttgttgatccttttaaaaaaccagctcctggattcattaattttttgaagggttttttgtgtctctatttccttcagttctgctctgattttagttatttcttgccttctgctagcttttgaatgtgtttgctcttgcttttctagttcttttaattgtgatgttagggtgtcaattttggatctttcctgctttctcttgtgggcatttagtgttataaatttccctctacacactgctttgaatgtgtcccagagattgtggtatgttgtgtcttttttctcgttggtttcaaagaacatctttatttctgccttcattttgttatgtacccagtagtcattcaggagcaggttgttcagtttccatgtagttgagcggttttgagtgagtttcttaatcctgagttctagtttgattgcactgtggtctgagagacagtttgttataatttctgttcttttacatttgctgaggagagctttacttccaagtatgtggtcaattttggaataggtgtggtgtgatgctgaaaaaaatgtatattctgttgatttggggtggagagttctgtagatgtctattaggtccgcttggtgcagagctgagttcaaatcctgggtatccttgttaactttctgtctcattgatctgtctaatgttgacagtggggtgttaaagtctcccattattattgtgtgggagtctaagtctctttgtaggtcactcaggacttgctttatgaatctgggtgctcctgtattgggtgcatatatatttaggatagttagctcttcttgttgaattgatccctttaccattatgtaatggccttttttgtctcttacgatatttgttggtttaaagcctgttttatcagagactaggattgcaacacctgcctttttttgttttccattttcttggtagatcttcctccatccctttattttgagcttatgtgtgtctctgcacgtgagatgggtttcctgaatacagcacactgatgggtcttgactctttatccaatttgccagtctgtgtcttttaattggagcatttagcccatttacatttaaggttaatattgttatgtgtgaatttgatcctgtcgttatgatgttagctggttattttgctcattggttgatgcggtttcttcctagccttgatggtctttacaatttggcatgtttttgcagtggctggtactgactgttcctttccatgtttagcgcttccttcaggagctcttttagggcaggtctggtggtgacaaaatccctcagcatttgcttgtctgtaaaggattttatttctccttcacttatgaagcttagtttggctggatatgaaattctgggttgaaaattcttttctttaagaatgttgaatattggcccccactgtcttctggcttctagagtttctgccaagagatcagccgttagtctgatgggcttccctttgtgggtaacccgacctttctctctggctgcccttaacattttttccttcatttcaactttggtgaatctgacaattatgtgtcttggagttgctcttcttgaggagtatctttgtggcattctctgtatttcctgaatttgaatgttggcctgccttgctaggttgcagaagttctcctgggtaatatcctgaagagtgttttccagcttggttccattctccccatcactttcaggtacactaatcaaacgtagatttaatcttttcacatagttccatatttcttggaggctttgtttgtttctttttactctctttcctctaaacttctcttctcacttcatttcattaatttgatcttcattcacttatatactttcttccacttcatcaaatcggctactgaaggtattgcatgcatcatgtagttctcatgccatggttttcagctctatcaggtcatttaaggtcttctgtacattgttttctctacttagccattcgtctaatcttttttcaaggtttttagcttccttgtgatgggtttgaacatcccctttagctcagagatgtttgttattactgaccttctgaagcctgcttctgtcaacttgtcaaagtcattctccatccagctttgttccattgctggtgaggagctgcgatcctttggaggagaagaggtgctctggtttatagaattttcagcttttctgctctggtttctccccatctttgtggttttatctacctttggtctttgataatggtgacctagagatggggttttggtgtggatgtcctttttgttgatgttgatgctgttcctttctgtttgttagttttccttcgaacagtcaggttcctcagctgcaggtctgttggagtttgccggaggtccactccagaccctgtttgcctgggtatcaccagcggaggctgcagaatagcaaatattgcacaacagcaaatattgctgcctgatccttcctctggaagcttcgtctcaaaggggtgcctggctgtatgaggtgtcagttggcccctactgggaggtgtctcccagttaggctagatgggggttagggacccacttgagaaggcagcctgtccattcacagagctcaaacactatgctaggagagccactgctctcttcagtgctgtcagatggggatgtttaagtctgcagaaatttctgctgccttttattcagctatgccctgcccctacagatggagtctacagaggcaggcaggcctcattgagctgcggtgggctcctcccagttcgagcttccagaccactttgtttacctactgaagcctcagaaatggtgaacacccctcccccacccagtctgccgccttgcagttccatctcagactgctgtgctagcagtgagcgaggctccatgggcgtgggacccactgagccaggcacaggatataatctcctggtgtgccatttgctaagaccattggaaaagcacagtattaaggtgggagtgtcccaattttcccagtacagtctgtcacgggttccctcatctaggaaaggtaaatcccctaaccccttgtgcttcccggtgacgcaatgccccaccctgcttcagctagccctccatgggctgcatccactgtccaaccagcccaatgagatgaacaaggtacctcagttggaaatgcagaaatcacccatcttctgtgtggatcaggctgggagctgcagaccggagttgctcctattcggccatcttggaatggcaatctatgtttgctttttacatttgaaaaaactggtgtcacgtacctaggtattaatcattgtggtatcctcttgccgatttacctctttatcattaactagtgaccctccttgtcttttgttgttacagtctgtgattttagtctattttatctaatatgagaatagctactctggcacttttttggtttccagcttcatgaaatatccttttccatttccctgttttcatttccctttcggtgtctctatagatgaagttgatttctttaaggcaccataagttgggtcttatttctttatccatttgaccatttagagaatttagaacactgtcagtgttattattcataagtaaaaacttaagagtgggtgtagtggtgtacatctgtatttcctgcactttgagagactgaggcgagctgatctcctggggtcaggagtttgagaccggcctggtcaacatgatgaaaccctgtctctactaaaaatacaaaaattagccaagcatgctggcatgtgcctgtaatccaatttacttgggaggctgaggcaggagaagcttgaacctgggagacaaatgttgcagtgagctgagatcacacagagaagtcatctccactctcctcatcagaacctcttgttcacagcatttgtgagcacaaatcaatgatggttattctttcctactaattagggatattttattacacagcaatagcctccagcaaagggaaccatcatacatgattcctacaagttgacagggctggaattatcactgaaaaactaaggtggctatacttgattcccaatgtccaatttttcatgaatagagaaatttatcctttttccccccagccagaaaccaagttttgctcttacgcccaggctggaatcaagtggcacaatctcagctcactgcaacctctgccccccagcttcaagaaattcaccttttgaacaaggagatattaaggatacactatgtgtatgctaccggtggttgcaggagactcagaaaagagagaaacagtcactggcctcgtgcaactgatattctcgggaggagagaaaggcaatcaagaaagaaacatgctgtatttcagacagctgtaagtcctccacaagaaaagaaagcaggtgaggaacataggaaatgtgtcaaccataaggttcccgctaattctataagttggtcagggatatcctccaagaataagcagcatctgagcaatcacctgaagggaggaaggaaggaagactgtgagtggtggcttacacctgtaatcccagcactttgggaggccaaggagggcagattgcctgagctcaggagttcacgaccactcagagcaacctgttgatacccaatctctactaaaaacacacaaaaaaattacccgggtgtggtggcacgcacctgtagtcccagcttccatgcccagctgatttctctctctccatatatatatatatatacacatatattgtttttgcagagatagggtctcactgtgtcacccagtcatcaagcaattctcttatactgttttggaaaagcatgggaattacaggtgtgaaataccctgctggtcctgaaaaatgtgatatttgggattctctgcctggcttgttttacccaaaataatgacctccagttccttccaggttgctgcaaaagacatgattttcactgttttataactgaatagtattcctgtatgtatacataccacattttctttatttattcttctgttgattgacatgtagggtgattccatgtctttgctactgtaaataatgctgcagcaaatatttgtgtgcattttgatctattcctttgagtaggtacccagtactgcaactgcaggactgagtagttgttatattttttgttctttcagaaatctccatagtgtttgccataaaatctgcactaatttacattcccaacaacaatgcataagatttccccttttctccacattctcactaacatttgttatgtttttgtctttttcataatacccattctgactggagtaagatatctcattgtggtggttgttgatatttttgagacggggtctcactctgttgccagactggagtgcagtggtgtgatcgtggcttgctgcaacctccacctcccgggttcaagcaattctcctgcctcagcctcccgagtagctgggactacaggcgcgtgccaacaggcctggctcattttttgtatttttagtaaagacagggtttcaccatgttggccaggatgatcacagtctcttgagctcatcatacacctgcctcagcctcccaaagtgttggaattacagtcatgaggcagcgcacccaacctcaatgtggttttaatgaccatttctctgacgattcatggtgtggagaatttctttgaaataccttttggccatttatatgtgctcttttaaaaactgactcctgtccaggtgcggttgagcatgcctgtaaccccagaacttcgggaggctgaggccaatggatcacttgaggcaaagaggcagaaatcagcctggccaacaaggcaaaaccccatctttactaaaaatacaaaaaatcagccacgggctgtgactcgtgcctgtggtgcaagttactcaggaggttaaggcacaggaattgcttgaacccggtaggcacaggtcacagtgagccaagatcatggcactgcactacagcatgggtaatagagaaagacctgtctcataaaaacaaatgaataaataaataagataaaaaataaaaaagtctctttatgtcctttgccgactttttaatgggattctttggagttttctgttgtagttgagatctttgtttactctcggtattagtcttttgtcaaaggaaaagtttacaaataatttcttccgttctgcagtttgtctgctcactctgttgagaggattatttctttggctgtgcagcagctttttgtttcagtaaagcttttgaatttatataattaaaattttcagtttggtttaaatttgcactggtcgatttttggttttgttgcctgtacttttgaagtcatactcttgaactctttactagacaataaccagaagagttttctctagttttcttctcacatttttattatttcagtacatatatttaagtctataattcatcttcaattgatttttgtagaaatagtgagaaataggagtccaggtttattcttctgcaaatgacaattcaattgttccagcaccaattattgaaaagggtgtgctttcctcaacgtatattcttatcagctttgtcaaagatcagttggctataaatgtgtggctttctttctgggctctctagtctgttacatcaatctgtgtgtctatctgtatactactaccatgctgtattggtgatgatggctttgtaatataatttgaagtcaagaaatgtgatgctcccagctttgtttatttgcttcagaaaggctgagtcaacagctgcagagatgaagctgcccctcctcgcagggctccttcccggaaaaagatcatggctcccactgaccatataaccatggctggaactcctgaaattcccaaagggaggccctacccagtgaggggggatgaatgaaggtcctacttaaggaatctgtctggccacaatcaggcacagcagctgtgctgccttgtgggggaccagaccacctggattccctggagcctgcaggctagaatgtctgagtccatggaaacacagaaatggaggccgccctcacctccccagaaaactgtagtctcaggcagtctccagccgattgccactggttggctgctattccaagccagtgggtcttaacttgagaggtgctgtggaagtggggcccacggaatgaggctgcttggctccctggattcagccccttttctaagggaatgtacagatggaactcccgccttgcccagctttccaagtatataaaactcctgagtctctgtgagtgtctgagcgagtgctctggcaacattcgacacggctctgtgtatctgacccaagacccttatggcatgagctaatgggaggatcttctgatccatgcgtggcaaagatgcatgggagaaacatggtttgtgggtaggggttgtgcattcactactgcttctcttggctgtaggtgaaggtttctttggctctgtgctgatactgggtgcaccatcacccaccccctttgtttcttctcctgggtcaagtcatttgcctaatcagtcccaatgtaggaacctggatacttcagttcaaggtgctgaattcaccgtgcttttcattcaggggaagacagctgcttctcattgggcatcttggcctgcccacttcacgtcactttttgtaaaatccacaccactccaggaatatccattacttaacttcgcctgaaataaacagaaggctcattacacttatcatgggctcacttacttcgcctataatgaaggtgccatggaaatgctagtggatgacgtggtccattttcttagggatgagatagaaaaatggtgtatggctttttaatttaattaaaatttttagtttggtttaaatttacattggtctctttttggttttgttgcctgtacttttgaagtcttactcgtgaactctttactggacaatgaccagaagagttttccctaagtttcttctgatattttgaccatttcagtacatacatttcagtctataattcactttaaattgatttttgtaaacatggtaagaaataggagttcagatttattcttccgcatatgataatgcaactgtcccagtaccaattattgaaaagggtgtgctttccctagtgtatattcttgtcagctttgtcaaagatcagttgcctatgaatgtgtggctttcattttggattctctcgtctgttacatcaatctgtgtgtccacatttatacctgtaccatgctgtattggtgactatggctgtgtaatatattttagagttaggaaatgtgatgctcccagctttgttcatttgcttcagctgaaaaggttgagtccacaattacaaagatggcagccgcccatccccggaggacctccaacccagaaagagatcaggcttcccaccaaccctataaccctggctggagttcctgaaattccaacagggaggaccttcccagtgaggagggatgaatcaaggtcaaatttaaagaaacagtctggccactatcaggcacagcagcagtgctgccttgtgggggacccctcctgctccagaccagctgccctccctggagcccgaaggctagattgtctgagtctacggaaacagagacggtggccgccccaaccacccagaactcggtagtctcaggcacttggcttgctatcttgccactgcttggctggtattccaagcccgtgggacttgagaagtgctgtgatgatggggaccacaggatgaggctgtctggctccctgtgatatggctgtgatgagtggaggaacaccagggctcatgtctcacacagaattggagaaaatgacacaaacacatgtacagtggttttatggcgtgcagtttaataggcaagaacgaaggaagagctccccatactgagacagagggaggggggctccaaagccaaaagaggaaacccggagtgctgtggataccaatgagttatatgaagaaactggagggggcggtgtctgatttgcatagggttcaggcgattggttcgaccaggcatgtcatttatgtggcccacggaaaaactggccctcccacctagcctttgaatatgcacgtgccggacaccctgatttcctacactcatggggatatatgggggtggccatatcgccaggcacaggtggggacaagggccagaagagggcgggaatcgctatgtttgggtggacccagtttctaatggccggcatctgcagatcaaggttaccggagaactctaaaagccggggctttcctgctagacaagactcatttctggagctgctttaaaaagaaacaaaacttcccaaggaccccttttcctccctgtctgcccaaaataatttcttaacaactcgtataacacctgaattcagcccccttactgggggaatgtaccaacggaactcccacctttcctggtttctcaaggctagattgtgtaaacctcctgggtctcggtctgtgtctgagcagctgctctgccaacactccacacagccctgtgtactaggcccaaggccgccgtgactcagcccatgggaggatctcctgatttcttggttgcaaagatccatgggagaaaaatggtttctggggcggggtcacacactcatggcttctcttggctgtgcaagaaggttcctttggctctgttccaatatagcgtggttcatcacccacccctgttttctttgttctcctgagtcaagttgtttgcctagtcagtcccaatgtgagaacctgaatatttcagttcacgtgcttatcgtgaaattcactgagactttaattcagtggaaggcagcctcttctaattggccatcttggcccgccccctccacgtcacctcccataaaatggccacgctctccagggacgatgccattatatatctttacgtgaaaccgacagaacacttattacactttttgtgagctcatttacttcacttataatgaacatggccatggaaatgctagtggagaaagtggtcgattttctgatggatgtgataaaaaaatggtttgccgaccaattaatgacatatgtctcaaaactagtaacgagacccttaatcgctgggttgaagtttctaatcaagaagatgctcatctatgtattcaacaaagcagcttcccttgcttctgaaatgcttccaaacaacatctcatatttcctgaagaagataatgcctggacaagcagcacaagtcattcaggtttactttcagctcataaatccagcaggatattcgcacaattgttgggaaaccttatcagttcatgagtcgtgcatgtttcctttaatttcaggaggaagagggtaatctggaagagtttcctgacctactctgctgctgtgattaaacaaccaccaggaaattttgatgacactgttctcctgagctcctccctttcctcggggaagaaaagcattgaaactacaaaaataaagtgttatttggctggagtgaggtctcatgtctgcttatgcggtggctcgctgctcagaacagggtgagtctctgagttgtacgctgaggaggggaggctgtcaatctagaaaaaacccattgcatgggacacctccatggggtctggggggctgaggatgaggagctggactggatctagggaaggaggaggtttcagagggtgaaattctggcagtaaatcctgggggtgtttgaaaacttcctccctcagaaggagaagactcagggaggaataaggacaaaccatgggtcccttgaggggcatttactaacttaagaggactttatcgggaagcagagtgacaatggcctccttgaggactgaggcccctggataaatgaggcccagatccagatccagtccatgggagatgagaccttcaagggacatatttttgttgggacagaggaaaagtgcagctctgcagctgcagaggaagccttggcagtgtgaaagcgaccttggagggggccctgtgcgttctgaatgcttctgaggtccatcccctgtccccgcctctttttctggattttttgggctccatggtctccgccatcttctgagcgctccacgctgccaccttcagttttctcttctgggctccaaatactccaaaatctttcatatctgtgcccctacccctgtttttagcatgtgttgggactccaggtccctgaaggtttctggcctgaaatccacctccccagcggtgtggattctgctctagagaccccgcacttggcaaggttcccaggcccctgggggacaaccgagtggtatgtgcacttcagggctccacactcggcaaggtctttcaagcccttggggttccctcctcagttttcttcacatgtctgggatgtagtcactctataaatgccgggatgtgatccccaccccagtgattttttttagttccatgagtgttgctatctgaatagtcatcctgagagtgatgggaccttttgaatttgcagcaagttttagattagtgtgagtggcctgagatcgcaaaactggggctagcattggatgtgaggttaggctggtggaaaaatttgcccagaacctgaggagtgtgggctcactgcaggtggttaggatcagcacagaattgcaaggatgtatagctttggggtaaagaataacatggttcagaagtacatgtattagtcttttcatgcattgctataaagaattacctgagactgggtaattaattataaaaactcaggtttaattggctcatggttccacaggctgtacaaaaaggatgatgctggccatcagctcaacttctggggaggcgtcagaaaacttagagtcatggcaaaaagcacaagggaatcaggctcatcctccatggccagagctggagctagtggtaggagaggtgctgcacacttttgaacaatcagatctttttagaactctatcaccagacagcacctagaggatggtgctaaattattcatgaaatatccacccatatgatccactcaattctcaccggcccaaccaggaccacctccaccattggggattacaattacacatgagatgtgggtggggacacagatccaaactcgatcagtgggcatcttggactgggtctactatagaagaagaaccaggagctgactatcatccttaagactgcccatgatggccaggcagggtggctcatgcctgtaatcccagcactttgggaagccaaggtgggtgaatcccctgaggtcaggagtttgagaccagcctcgccaacatggtgaaaccctgcctctactaaaaacacaaaaaattagatgggtgttgtgccagacgcctgtaatcacagctactccagaggctgaggcatgagaattgcttgaacctgggaggcggaggtggcggtgagccccaatcgcactgctacactccagcatgggcaacaataccaaaacatcgtctcaaaaaaaaaaaaaaaaaaaaaaaaggctgcccatgaccactgccccagtgagagggacaccagcatggctaagatcaagtgctggacattcttcatgggtcagacattaaagcaggccacactgttacagagatgggctccattcatagcaacaaagtggtgagaagatgtgggaatggcagaggccagcactttgccatcaatgcaaggtgggcataaggagctggcaccagtgccagagtgcatcaggggaggactgctttgcaatatctagcacttacctcttagagtatgtttcattagggacaacagatataaatggcagacaagtgagtcccttcagtaacaggaaatagaaatcatcaagaggaacagaaacagatgtcagcagccctcatataaagtcatcatccttcatccagttaaaacctgagacagttctcacataagaaggtctaattcaaaaagagactgggttctcatgaggcaggttcatgcaaaaccaagggaagtatacaactttgggattctccagcttcccttggaaaagacctacaatcatttgcttaggtaactgagcactgaacaaaggtgagtattgttatctttcagaagctgttggccatgaaggtcttgctggcataaaacccatggttggaaacatcaccatgacccctgttagagtaatggcctaagggcaagggtcaggaaattgatgtattccttgccaacttctgcgagacgagtgttggtccactcatctctttcacggaattcaccagtctggtatcttcaaaatccagaaggatgatggcagatggcaggaaactaatgcaaacaccatcagttgtacctccactgtagcagcagtaatggatgttatctcttcattgtaatatccagggagggagaagatgacattattctcaatattctaaacaccctgtgtgtacagcctctgtgatattttttgtaatatccgtgtgggagagaattatattactcctaatatctcaggggttgtgccccctctgtgacaatgttcctaacacccaggaggggataggatgatatcacttttagcatcacagggggtgtacaccccactgtaatattgttcataatatccgggggggagagaatgatattactcccaatatcgcaaagactgtacaccaacctgtgatattatttgtaatatccataagaggaagaataatattactcccaatgtcacaggaagtgtacacccttctgtgatattgttcaaaagatccagttagggaggggatgatattactctcaatatcttaaacaccctgtaggtaagccctctgtgatattcctcataatatccagagggagaggatgatattactcccaatattgcatgaagtctacaccccacctgtgatattgttcctaatatccaggatgggagaggatgatattactcccaatgtcgcaggggatgtacaccttccctgtaatattgttcgtaatatctagaaaaggagaggataatattactttcaacatcgcagggggtgtacaccttccttgttatattgttgctaatatccagggaaaaagaagatgacattaccaccactattgcagaaggtgtacacccccccttgatatagttcctaatatccagaaaaggagaggagatattactccaaatattgcaagaggtgtacattcccctgtaatatttttcctaacattcaggaagaaagagagtgatattgcccttaatattgaagggagtgtgccccccccgtgatattgtttctaatatccaagaaatgaaaggatgatattactcccaatatcacaggggctgtacagccccctcccatgatattgttcccaacatcggggggggggtgaaatagtattattcccagtatcacaataggtgtacacacctgtcgtgatattgttcctaatacccatgggggaaaggacgatattattcttaatatctcagagggatgtacaccctccctgtgatattgttcctaatatccggggtgggagaggatgatattacccccaaaatctcaaagggtgtacacccctcttgtgatattgttcctaatatccagggtggagaggataatattattcccaatatccaggaaaggaaacgatgatgttactgtgaatattccagggggtgtcctcccctctgtgatattgttcctaatatccaggttggggagattatgatatttctccaaatatcacaaggggtgtacaccaaccctgtgttattgttcctaatatcgatggggggagaggacgatattactcccaatatcacagggggtgtacaccacctttatgatattgttcctaatatccatgaagaaagaggatgatattactttcaatatcgcaggggatgtacactccccctgtgatattgttagtaatacctaggagaagaaagtgtgatattactcccaatatcgcaggggatgtacacgcttcctgtgatattgttcctaatatttagggggaaaggggatgatattactcccaatatcgaatggtgtgtacacccccccgtgattctttttttttttttttttttttttttgagatggagtcttgctctgccgcccagactggcgtgcaatggcgcaatctcggctcactgcaacatttgcctcccaggttcgcacgattctcctgcctcagccttcggagtagctgggattataggcagctgtcaccataccaggctaatttttgtatttttagtagagttggggtttcaccatgttggtcaggctggtcttgaattcctgacctcaaataatccacccaccttggcctcccaaagtcctgggattacaggcataactttccctgtgatattcttcctaatattcaggaagaaagaggatgatattgctcccaatatcgcagagagtgtgcactcctcctgtgatatggttcttaatattcagaggaggagaggatgatattactttctatattgcagaaggtgtacacctccctcgtgatgtctttcctaatatccagtgggggagaggttattagtctcaaaatcacagaaggtgtaaacccccatttgatattgttcctaatattcaggggtggggagagaaaggtattactcctagtatttcagggcatgaacacccccaccgtgatatcattcctaatatccagaaggggaggcaatgatatttctcctaatatcacaaagggtgtacaccccttctgtgatattgtaaatattctgtgtgtacacccccctgtgttatagtctgtaatatccgggtgggggagagggtgatatttctccccatattgtaggggatgtacacccttctgtgatatggttcgttatatccagggaagaaaaaggtaatattgctgcccatattgtggagagtgtacacccccatgtaatatggttcgtaatatccaggagtggagagggtgatactgctccttacatcgaggaaggtgtacaccttattgttatatgattcgcaatatccaggggaggagagagtgatattgctccccatgtcgcagggggtgtaaaccctccgtgatatgattggtaatatccaggaaaggaaagggtgatatttctccccatatcgcgggggacgtacatcctcctgtgatatggttcgtaatatccaggaggaaagaggaaaatattgctcttcataacccgaggggtgtacaacccctgtgatatggttcgtaatacccagaagtgtacacccctctgtgatatggtttgtaatatccagggggttagagggtgatattgctccccatatcgcagtgggggtacacccccctggattggttcataatattcatggggggagaaatttacatttatcctcatatcagggggggtgtacaccccccgtgatatggttcgtaatatccaggggaagaaagggtgatattgctccttatatcgcggaaggatcaccctcccctgtgatatggttcataatacccagacgggaagagggtgatattgttcttcataaagcgaagggtgtacagccccctgtgatatggttcataatatgcaaaaggggagagggtgatattgctccccatatcacggagggtgtactcccttctttgatatggttcgtaatatccaggggtgtagatggtgatatagctcgccctattggggagggtgttcacccctctgtgatattgttcgtaatgtccagggaaagagaggatgatattactcccaatatcgcagaaggtttacaccactctgtgatattgttcataatatccagggaaggagaagacgatattactcccaatatggcagggggtgtagaactcctgtgatattgtttgtaatatccaggcaaggagaggatattactctcaatatcgcagaaggtttacacccctatgtgatactgttcatgatatccagggaaaaagaggatattactccctatatcacaaagggtgtacacccctttgtgatattttttgtaatatccaggggagagaggataatattactctcaatatcagaaggggtgaaaaccctcctgtgtcattgttcataatatttagggaaggagagagtgatattactccaaatatcacagtgggtgtacacccccctatgatattgttcctaatttccagaaggggagatatgatattattgccaatatcgcagaaggtgtacaccttactctgacattgtttgtaatatccagatggggaaatgatgatattactcctaatatcacagggggtgtacacccccttgttttattgtttgtaatattcaggggaagagacgattatattactcccaatatcgcagggtgtgtacaacactctatgatattgttcataatatccaggggaggagaggaagtgtacacccccccgtgatattgttcgtaatatccagaggtagagaggatgatattactcccaatattgcaggtggtgtacacctttctgtgatattgtcatgatattaagaaggggagaggatgatattactaacaatatcacaaaaactgtacactccctgtgatattgttcataatatccagaagaagggaggatgatattattctgaatctcgcagaagatatacaccaccctgtgatatggttcataatatcctaggggaaagaggatgacataactgtcaatatcgcagggggtgtacaattccctgtgatattgttcacaatattcagagggaaaaaggataatattactttcaatatcgcaggcggtgtacacattactgtgttattgtttataatatccggaatgagagaaaattttctcccaatatcacaggaggtgtacactcccctgtgatattgttcgtaatatccagggaggggagaggatactattactcccaacatctcagggagtgtaggccccccctttgatattgttcctaatattcggaagtggagaagatgatattacttccaaaatcgcagggggtgtacactccctctgtaatattgtttctaatattcatgagtggaaagaaagatattactcccagtattgcaggggacatacaccacactgtgatcttgttcacaatattcgggggggagaggatgatattactcccaatatcaaagtaggtgtacacccccttctgatattgatcgtaatatccagaattaaagatgataacgttactcccaatattgcagggggtgtacatttttgaatactgttcataatattaagagggggaggggatgatatctgtcccaatatcgcaaagtgtgtacacctcctgtgacattgtcccaaatatccagaggaaaaaaggatgttattactcttaatatctcagagagtgtacacctccctgtgatattgtttgtaacatccagaagaaagaggctgatattactcttaatatcgcagggggtgtacacccccgccccgggatattattcgtaatatccagggggaagtggaatgttcagaatgggagaggatgatattacttgcaatatcatagtgggtgtacaccccactgtgatattgtttgtaatatccgggaaaggagaaaatgacattcctccccatatggcaggggctgtacaccacctatcatattgttcaaaatatccagaaggggagaggatatgtctccaagtatcacagggggtgtacaccccgctgtaatattcttcctaatatccagggtgtgagaggataatagtactcccaatatcccagggcatgtacaccccccttgtgatgttgttcctaaaattcatggggagaaagaatattactcccaatatcacagggggtgtacatacactctgtaatattgttgccaatatgcagcaggagagaggatgatattactcccaatatcacaggggctgtacaccccgctgggatattgtttctaatatcaagggggaaaaaggatgatattactcccaatgtcgcagggtgtgtacttcctctttgtgacattgttcctaatatccaggagagaagagggtgacattccttccaaaactgaaaggggtgtacacaccctttgagatattgtctttaatatccagaacgaaacaggatgatataactcctaatactgcaggggggtacaccctctctgtgatactgtttctaatatccaggaggggaaagaaaaatattaatcccaatatcacagggggtgtacattccccctttaatattgttcctaatatccaggaagacacaggatgatactatttccagcagcacagggcatgtacacccctttgtgatattgttcctaatatccaggaaaagagaggatgatattactgtcaatattgcagggcgtatacactggttctgtgatattgtttctaatatccgggggtggagaaaatgatattactcccaatattccagcgggtgtacacccgttctatgatattgttcctaatatctgggggagagagaatgatattattgtcaatatcacaggggatgtacagattccctgtgatattgtttctaatattcacagggggagaagggtataatactcccgatatcgcagggggtgtacactccccctgtgaagttgttcctaatatccagggattgagagaatgatattactcccaatatcacaggcggtgtaaaccccctgtgtgatattgttcctaacatccagaggaaaagatgatgatattattttcaatatcacagggggtgtacgcatccctgtgatattgtttctaatatccaggggaggagaggatgatattattgttaatatcgcagggggtgtaccccaccctgtgatactgttcctaatatccggggtggaagaggataatattgctcccaatatcgcaaagggtgtacaaccttcctgagatattggtcctaatatccagggagggagaggatgatattactttcaatatcacagggagtttacacaacccctgcgatattgttcctaatatccagcggaagaagagttaggataatactattttcaaaattgctgggtctgtaccccctccccgtgatattgtttctaatatccaggaggggagaaagtaatatgactcccaatatcttagaagatgtacaccctccccataatattatttcttacatccagggggtagaggatgattttgctttcaatatcacagagggagtaaacctttccggtgatattgtttttaatatttaaaaagagagaagataaaattactcccaatacaaaggggatgtattgtgtactcccccctctgatattcttttttaatatccagatggagagaggatgatattactttcaatattgcatgggatgtataaatcccctgtgttattgttctgaatatacaggtggggagagtatgatattactccaaatatcgcagggggttctttccccctgtgatattgttcctaacattcagggagggagaggatgatattactcttaatattgcagggggtgtacccacgcctatgatattgttcctaatatccagagggggagaggatgatctaactcagaatatgacaaggggtgtacacacagcctgtgatatggttcctaatatacaggggagaaggggataatatttctcccaatatcgcagggggtgtacaaccccctgtgatactgttcctaatatacagaaggggacagcatgatattgttcctaatatcgcaggaggtgtacaacgccctgtgatattgttcctaatatccagggcgggagaggatgatattaccctcaatatcgcagggggtgtgcactttccctgttatattgttcctatgatccgggtggggggaaatgacattagtcccaatatcgcaggatgtgtgcaccgctcccccgtgatattgttcctaatatcaagggggagagaggaggatattactcccaatatcgcaagggatgtacatcctccatgcgatattgttcgtaatattcaggaggagagaggatgatattactcttaatatcgcagaaagtggacacccaccctgtgatgttcttcataatatccagggaagcagacgattatatgactttcaatatcgctgggagtgtacatcccttttgggatattgtttctaatatccaggaagggagaggattatattactctcagtattgcaggcagtgtacaccttttttgtgatattgttcctaatattcagaaagggaaaggatgatattactcccaatattgcaggtggtgtatatccccctctgatattgttccttatatcaaggaagagaaagaataatattactcccaatatcaaagacagtgtagacccctcctgtgatattgtatttaatatccatggggaaagaggatgatgttactcccaatatcgcagggggtttacacccacactgtgatattattcctaaaatccagtggaggagaaaataatattgctcccaatattgcagggtgtatacaggccctcccccgttatattgctcctaatatccagcggtggagaggatattactttcaatttgtgtagggagtgtatacccccctgtgatatttttctaatatcaaggatgggaaaggatgacattactcccaatatcgcaggaggtgtacacgccctgtgatattgttcctaatatctagggaaggagaggatgatattactttcaatattgcaggagctgtacaccctctgtggtattgttcttaatatttaggttgggagaaaatgatatgagtccaaatatcgcagaaggcatacacacttccaataacattgttcttaatatccgggggagagggtgatattactcccaaaatctctggggggtgtacacccccttctgatatttttcctaatatccagggaaggaaacgatgatattactataaatattccaaggagtgtacaccttcctaatatcctaatattgttcctaatatccaggggtgggagaggattatattactcccgatatcgcagtgggtgtacacccctcctgtgatattgtttctaatatccaagctaggagaaaatgatatcactctcaataccacagggggtgtacaccttccgcatcatattgttcctaatattcagagggaaagaagatgaagttactttcaatatcggaggggttgtacacaacccctgtgatattgctgctagtatccaggaagaaaggggattatgttactccccttatagcagggggtatacacctcccctgtaatattgttcctaatatcaaggctgggatatacgtggggggaaggatgatattactcccaatatcgcaggggttatacaaccttctgtgatattgctcctagtaaccagggcagaagaagatgatattactcctaatatcgcaggaggtgtacactcccccattatgttgttcccaatatgcagaaaaggagaggatgacattattgccagtatcgcagggtgtgtacaccacccctgtaatattgttccaaatatttagggggagagaggatgatattactcccaacatcgcagggggtgtacacacatcccctgtaatatagttcttaaaatctaggggaaaaggggatcttatttctctaaatattgcagagggtgtacactccccggtgatattgttcctaatagccgggagggagataattaaattactttcaatatctcagagagtgtacatcgcccttgcgatattgttcctaatatccagagcaaaagagaatgatattactcccaatatcttaggagtgtacatttaacctgtaatattgttcctaatatccagggggaagagaatagtattactgccaatatcgtaggggttgtacaccttttctgtgatattgttgcaaatatttagtagagggaaagaatattactcgcaatatcacagggaatgtatacttcccctgtgatattgttctgatatccagaaaaagagagggtaatattactcccaatattgcagggggtgtacaccccccttgtgatattgatcctaatataaaggaaggaagaggatattactcctcatatagaaggggttgtccaccccccttgtgatattattcctaatattcagggaagcagaggatgatattattttcaatatcacagagggtgtgcagtccacctgtgatattgttcttaatattcggggggagaggatgttattatgcctgatatcgcagtagaggtacacccctcaagtgatactgttcctaataaccaggggtgaagaggatgatattactcccaatatcgcaggtggtgtacacccccccatgatggtttctaatatacagagggggagaggaaaatattactcccaaaatcgctggaggtctacaccccccttgtgatattgttcctaatatccaggaaaggaaacgatgatattactgtgaatattccagggggtgtacacccgctttgtaatattgttcctcatatccagggtgtggagaggattatattactcccagtatcgcagggggtgcacgacgcccctgtgatattgtttttcatatccaggaggggagattattatcaatatggcaaggggtgaacaccccctgtgatattgtacttaatagttaggttggcagaaaatgatattagtctcgatatcgcagggggtgtgcactccgcctggtgatattgcttttaatatcaagggggagaaaatggcattactcccaatatcgcagggggtgtacaccgctcatgtgatattgttcctaatatccaggtggagagaacataatattactcccaatatcgcacaaggtgtacacccctcctgtgatatggttcctaatatccatgggaggagatgatgatattactcccaatatcacaggggatgtacaccacccttgtgatattgttcctaatatccagggaagaaaacgatgatattattgtgaatattacagggagtgtacacactccctgtgatattgtttttgatatacagggtgggagaggatgatattactcccaatatcacataaggtgtacaccccccgtgatattgttctaaatatttcggtggggagaaaatgatattagtctccatatcacagggggtgtgtgctcctcaggtgatattgtttttaatatcaagagggggaggagattatattactttcattatcacagggggtgtacacccctcctgtgatattgttccttatatccaggcgaggggaaaataatattactctcaatatcgcaggaggtgtacacaccccatgtgatattgttcctaatattaagggggaaagaagataatattactttcaatatcacagggtttgtactcctttcttgtgatatagtttttagtatccagggggaaagagcatgatattactcccattgtagcaaggggtgtacacacctcctgtgatattgttcctaatatccagaagtggtgaggatgatattactcccaatatcgcagggggtatacaccccacctatgatattatttctaatatccatgggaaaagagtatgatattacacccaatgtcgcagagggtgtgtatttttcctgtgatattgtttctaatattcaggcggggagaagatgatattactctcaatatagcagaaattgtacatccccgctgtgatattcttcataataatcagggaaaaagaggatgatattactaccaatattgcaggggggttacacttcccctatggtagtgttcctaatatccaggaagaaagaggatgatattaatcccattatccaggaagtgtacacccaccctgtcatgttgttcctaatatccagcagggaagaggatgatattacaccccccccccgtgatattctccttaatatccaggaggggagaggctgatattactggatatatagcaggggtgttcataccttctgtgatattgttcctaatatccagaaaaggagaggatgatattacttccaatatcgcagaaggtgtacacctccctgtgatattgatcctgacattcagaaggggagaggatgatattactcaaaataccgcagggcatgtgcattcccttgtgatattgttcctaatacccagaagggaacaggataatattactttcaatatcgcagggagtgcacacccccctttggtatggttcttaatatccagaaggaaagagggtgctattactttccatattgcaaggggtgtacaccccactgtggtatggttcataatatccaggcagggagagggtgctattactccccacagtgcggggcatgtacaccctgctgcggtacggttcctaatatccagggggagagaggatgctatgactccctatatcgcggggtgtgtacacccctgtgtggtatgttttgtattctccaggaacggagagggtgttgttacccctcatatcgctggaaatgtacactcccctgtggtatggttcgtaatatccaggggattgagggtactgttacccccatactccccatatcgtggggggagtgcacctccctgtggtatggttcgaaatatccagggtaagagagggtgctattattccccattttgcaggaggcgtacacccccctatggtatggttcgtaatatccggggtgaggggatgctatcaaaagaagagagaaagagaccccccatattgttctatattattttatactcagtacctgttttaagaagaaacaaggaagtgaaaccaaaagcaggcagcccggcgccaggcaccagacccaaaaccagacccgaaaccaggcctgggcctgcctgaccttagcctgatagttaaaattcaacccatgacctagcaaccaatgttatccatagattccagacattgtatggaaggacattgtgaaatttcttgttctgtgctgtttcactctgattaccggtgcctgcagcccctgtcacatacccactagattgctcaatcaatcatggccctttcatgtaagatctttagtgttgtgagcccttaaaaaggacagaaattgtgcactcaacaagctcggattttgagacgctagtctttcgatgcttccagctgattaaaagccacttccttcactacctcggtgtctgtggggttttgtccgcgactcctcctgctacactatgactccccatatcaaggggggtgtacacccccctgtggttcgtaatatccagcaggggaaaaggtgctattactccccatattgcagggagtgtacacccccttgtagtatggatcgtaaaatcaaggggggagggaaggtgtaattatccccatatctcagggggtgtacacccctttgtggtaaagtttgtaatatccagggatattacagggatattatccccaaattaatacttttataatttcttatgcctgcctttactgcaatctctgaacataaattgtgaagatttcatggacatttatcacttccccaatcaatacttttataatttcctatgcctgtctttactttaatctcttaatctcatcatctttgtgagctgaggatgtatgtcgcctcaggaccctgtgatgattgcattaactccacaaattgtttataaaacatgtgtatttgaacaatatgaaatctgggcaccctgaaaaagaacaggataagagcgatgttcagcgaacaagggagataagcataaggtctgactgcctgtggggctgggcagaacagagtcacatttttcttattgcagaaaatgagtaggagaaatatcactgggaagggaacgcattcctaggggaggcctatggacggccgctctgggggtgtatcccttatgtggttgaagataagggatgaaatacaccctggtcccctgcagtgccctcaggcttgctaggattagaaattccagcctggcgaattctagtcagaccagttctctgctcttgaaccccgtttcctgttaagatgtttatcaatgacaatgcgtgcacagcaggacatggaacctcaatagtaattccattttctccctggccttgtgaccttgctaggcccttctgcccttgtgatcttttattgccatttgaagcatgtgatctctgtgacccactccctattcgtatccccctccccttttgaagtccctaataaaaacttgctggttttgcagatcaggtggtcatcacagaacctgccgatatgtgatgtcaccccggaggctcagctgtaaaatttctctttcgtactctttcactttatttctcagaccaggtgacacttaaggaaaatagaaaagaacctactttgaaatattgggggctagttcccccaatagacattgttcctaatatccagaaaaaaagaagatgatattactcccaatatcacaggggttgtgaaccccacctgtgatatggttcctaatatccaggaagggagagaatgatattactctccatattgcagggggtgtgcacatccctgtgatattgttcctaatatccaggggaggagagggtgatattactcccaatattgcaagggttgtaaactccaccctgtaatattgctcctaatatttaggatttagggggggagaggataatattactcccaatatcgcaggggatgtatatgccctctttgatattgttcctaatatccagggggggagaggataatattactttccatatcacaaagagtgttcacccccctgtgatattgttcctaatatccaaaaaggaagaggatgatatcaatcccaatatcacaggaagtgtacaccccccccttttatattgtttctaatatccaggggaaatgagggtgatatttctctcaatatagcagaatgggtacactccccctgggatattattcctaatatccaggggaaaaaaagaggttgatattcttcccagtatagcagggaatgaatacaccctttgtgatattgcttctaatatcaaggggaaaagaggatgatatgactcccaatatcacaggggatgtaaacctgtggcgttgttgctaatatcaaggagggaagagtatgatattactcctaatgtcgccgaaggtgcacactttccctgtgatattgttcctaatatccaaaagggaagagaatgatattacccccagtattgcagggtgtacaccacccctgtgatattgctcctaatacccaggaaaaaagagaatgctattacccccaatatctaaggggacgtataccttccctgtgatattgtttctaatatccaagtggggagaggatggttttactctcaatattgcagggagtgtacactccccctgtgatactgtttctaatactcgggctgggagaaatagtattactcccaatatcgcagtgatattgtttccctgtgatattgtttctaatatctagtgggggagataattatattactaccccatacacaggggagggtgtacattcccctgtgatattgtttgtaatatccagggaaggagaggatgttactcccaatatcacaggggttgtacaccccttttttgatattgttcctaatatctggggggcagagaattatattactgtcaatatcacagagtgtgtacaccccctctgttatattactctttatattcagggcggtagaggatgatattactccctatatcacagggggtgttcacccctcctgtgatattgtttataatatctaaggggaaagaggatgatatcactctcaatatcaaaggaaatgtacacctttcctgtgatattgtttttattatataggggggcagaggatgatattaagaacaataccacaggggatgtacacccacgtattgatattgtccctaatatgtatggggaaagaggacagtgtaactcccgatatcgcagagtgtgtacacccccttgtgatattgtttctgatatacacggggagaaaagataatatttcttccaaaattgcagggggtgtacaaccccctgtgatattgtttttaatatccagtgggggagagaatattactcccaatattgcagggcgtgtacacaacccctgtgatattgttcctaatatccagagtaggggaggatgacattactttcaatatcgcaaggggtgtacattcccctgtgatattgctcctaatatccatgaggggagaggatgatattattcctaatatggcaggggctgtacaccttccctgtgatattgtttctaacatccagtgggggagaaaatgatattactccctatatcacagaaggtgtacactttccctgtgatattgttcctaatatccagaaggggagaggataatattactcccaatatcgcaggaagcttacaactcccctgtgatattgtttctaatatccagggaggtagggatgatattactcccaatatcgcaggggatgtacactcccccgtgacattgtttctaataaccagggggtgagaggatgatattacgcttaataccgaagggggtgtacacacccttgtgatattgtgcctaatagccagggggaagaaaattatattaattttaatatttatggggaaaaaggatgatattactcccaatatcacaggggctgtacaccgaccttttgatattgtttttaatatccagaagagaagaggataatattgctcccaatatcagaaaaggtgtaaaccccttctgtgatattggtcctaatatccagggagggagagaataatattactaccaatatcacagaaggtgcccacccccaaggtgatattgctcctaatatccaaagataatagggtgatgttactcccaatatcacaggaggtgttcacaccccttgtgatattgtttctaacgtacagggaagggagaggatgatattattcccaatatcacaggaggtgtatactcctctgtgatattgattttaatattcggggggaaaggatgatattactccctatatcgcagagggtgtacaccctctgtaatattgatcctaatatccagggcgggataggatgatattactcccaatatcgcagaaagtctacacaacccccagtaatattgtttttactatccagggggaagaggatgacattactcccaatttcacagagtgtgtacactcaccatttgatattgtttctaatatctagggggagagaatatattactcccaatatcacaggaattgtacaccacctctgtgacattcttgtgaatatccggggaaaaagagaataatattactcccaatattgcagagcgtgtacacccctccatgatatcgatactaatatttttttaaagaggatgatattactcccattgtcacaggatgtgtacaccccccttgtgaaattgttcataatattctggggggagagcataatattactccccatatcgaaaaaggtgtccaccctccttataatatggttcctaatatccaggatattacttaatccaggatacttgtaataccctaaatatacaattgcttgaacctccacctcccaggttcaagcaattcttctgcctcagcctcccgagtagctgggactacaggggcacaccaccacacccagctaatttttttttcttgtatttttagtagagatggggttttgccatattggccaggctggtctcaaactcctgaccttgtgatctgcccacctcagcctcccaaagtgctgggattataggcgtgacccaccgtgccaagccaggaagaggatgctctatagatttccccaataagagatggctttgcagggccattccaaaatatgtcaaagaaatacatttggggataaaatactttgatttcctttagggaatgttatctattatgtgatgctataccagagtcaggttggagtcggttatcttattgcaacaaagagtctgttccgtcactgttgggatctctattttttcctcttatttcttgagacagggtctcactctgtcacccagtctggagtgcagtggtgcgatcttcattcactgaaacctctgcctcctgtgttcaggtgattctcgtgcctcagccccttaagtaactaggattacaggtgtgcgccaccacacccagctaatttttgtattttcagtagagatggtattttgccctgttggccaggctggtcttgaactcctggcctcgtgtcatctgcccacctcgacctcccaaagtgctgggactgcaaatgtgagctattgtgcccagccaggatctctgttttaatgttagtgctggtcactttgcatgaactccaaagggaagaaatataatgaggtgtgtctgaccccctgccttctcatcgtgacctgaattagtttttcaggtttgcaggggatacccttggacaagaaggggctctattcggttggttggggggattagaattttactttttgtttacaatatttctcctgaaagagttaggggctcacaaggaatttccgcgtgagcaacttatgaggaaagccatctgggaagatatgtgtccttgtgtcactgggatattctcgtttaccccaatgatacggcaatgacgcagggttgtgaaattacagctatgtgtttggggaaaaaagaaagcaggattgtgtgactacgtttccaaacttcacttgcccttagccatagtgagttgggggcctggagattctgttttctttcacaatgatatagatacaattaaatgtatagaaagcaaaaaaataaaaaggtgagtaatgaggaacctctgattcctgagtggccatgtagttacccatggcacagagccacagttactgaaggtaaagtttgctggggaatttagaaatgaatccagctcttggaggagtcagtttactggatgcctaagaaaatgcaaacaaaataagaaaaaagggtaatattcaatcccatagttattgttacctgtcatagctaaagtaaaattaaaacagagtgctggcttcaatcttgatgctacactaagcttagatttcagtgaatgtgagtctcagccactagctcagagccacctcccaaagaccaaatcatgtagggacaatagaaagtacttctgagaattgtggttaccaagaacctagtaactgttggggaggagcaaaacaaagtacagaaaccagagggtacaatctgagtgagactgctatcagcttctggaggagcctttactaaaatgaatgatgagagtaactggatgatgagagtaactaatggatgatgagagtaagcaatgtctttggttttcttttttttttttttttttttttagcagacgtctcactcttgtcgcccaggctggagtgtaatggcatgatctcgcctcactgcaacctccacctcctgggttcaagcaattctcctgtctcagcctcccgagtagctgggactacaggcactcatcaccacacctggctaatttttgtatttttagtattttctggtgagggtccaggtttccggaaacaactcagagacatatgttaagatgttatctttagttttcacagggaaccaaatatgttacgactccaatttccttggctattgttttaagttaccattaccttctcgttgatcaagttgctcatttacttctcaagcctagctagatgcctggaatttcccttgaaggaagtcaagattttcctttatctccatactggctgatggtgatcgagtaagcccctaagaggggtccctgctccatctcgagatgctgctagattctacagtgcctaataaacagctctcgcctggccgacaaagagctgcttgctctctggatagcaattccaaagtgaacagacaacatcctgtttggaagactgccactctgttagaagaagcatcaggaaaacctttcttttgagctatttataactaacagcaattgaccaagtatacttttgtgagtgaaactgacctttctccctgtaagaattctccaaaatttggaaactatttgtgagtatttttacttatggcaatataattattggcacaagctcaatcagattcggttttctttcgtaacaggaaccattggagatactcattactctttgaaggcttacagtggaatgaattcaaatacgacttatttgaggaattgaagttgactttatggagctgataagaatcttcttggagaaaaaaagactgggtatattttcaatatgctttccttttaaggtccctcacctgtggaaagtaaagaatgtcactttctgacaggctcaggaacctcaagttatgtagggatctcaagaagatgggggaattcacccagttcatacaggtgaaattgctgttgcaaagattatgaatatgagagaagtccagcatggctgacttcatctcgtgtctggcctcaggctggctgcccttgctcactcttgggcataggccaagctagccatgggaggaatttagtttatagtttaactttgaagcacggatgataatagtctctccctaaaatgaaccccttccttgctcagggactgaaactacctttgtatgacaaatgaaagcccacaagattaagattatgagaggggcctgaattctgctaaaatgcaggtgtagctgactgataacaagtcattgtcccacagcttgcctttctataatctcttgcttctcaggagtcacatggccagaggtcctgagatttccagtcctgtgacccccacccagagatggacttagtgcatgaggaccattttccacacccctatgatttcatcctcaaacaatcagcagcaaccattccctagccccctgccttccaaattatccataaaaatcctagcctctgagttattagggagattgattaataatcccagtcctaccccttgggttgctctgatttaattaaaccttctctactgcaataccacggactcagtaaattggttttgtctgtgcaatgggcaagaagaacatgttgcatggttatacaggtactacaagcacagtctgatggcaaattattggttttgcttcctgcccttgatgtttctaaacatctagtccaaaattacttgtgaaaggtccagcaaagccaattttaaaagaggctatatggccaatcactattctttctacacattattgcaaataatcaggccacggctgggcacggtggctcatgcctgcaatcccagcactttgggaggctgaggcaggatcacctgaaatcaggagttcaagaccagcctaggcaacatgataaaaccctgtctctactaaaaatacaaaattagccaggcatggtggcatgcacctgtaatcccagctacttgggagactgagggaggagaatcacttgaacctgggaggcagagattgcagtgagctgagatcacaccactgcactccagcctgggcaatagagtgagactttgtctcaaataataataataataatcagaccaagtataatgaaattaaaatttattttgcaaataaattggtcctactacaatttatccttcatagaaatgtggaaactgaagataaaaaaaattaggtttcagaagaaaactatactacacctgttattagattctagccctaaacattgtttttgaggtttttattatttacctgcaatttggtctaaattctgaattatttcctgactacaagtatccaaggaataaatgggttttctttttctttatgatagttttagttggcttctaatgcaacaacaatttttattgtaatcctgtgtgcattctattcctactattcaaattattaatgttatagatctttcattgtagtacttctgaattaaccaaaatcacagtattctgaagatgattctacaaagcctgctgtttctacaaaggctgctgatgatttctacaaagcctgctgtagtgttgctgtggcctctgcttaaaaaagtagaaaacacattgatgcagcatgttcaccccaacctccctgcctaaaggctcagggaccatcttggaagaggaaggcgcgtgagattgtaagagccgaattagggggatggagtgtggagaataaggacacttcatcttggatgctcacctgccaaattgacttctgatgaaagccagctccagaaatgtgcctacagttactactttcacctaaaccctgcccttagtcaaatccttctcttcttctaagcaatcaacttcaattccttgtataacccacagtataaaagggcttttataccattctatcctattgcatgtaagccttgggtctgggaggtaacagtgtgggattccaccatctcatctccctgccacccaaacatgcctgctcttctttaagcaatattaaatgtttgtacttcagaaatttgatttgtcagcctcttcttcagactctcagcttctttggcctttgggagtaaatttgcataggcctgctcaaaacaggatgttctgggggtttgggggtgttgttttgttttgttttttgttttgtttagagacagggtctcactctgtcacccaggttggagtgcagtggtgcaatcatggcacactgcagcctcaaactcctaggctcaagcaatccccccaccttggcctcccaaagttctgggattacaagcataagccaccatgcccagccctggacttttctttaaagacatttacacagtgtaggaattactgtgggtgcactgctcaggtccccttctccaggatgctcattcctacctcatagatgattttcctgcagagatttgacctcagctgaagggcagtcacctggtccaggtggttgctattcacctccttcctgagaacagccaacagccagggacacgctagcacagagatataagagcgaccaaggtgaggccccttctgtgctgcggtgcatgctccagagcctccctgggatcagacttaagagggtctccagccagatctggtcttcgctgctttcctcgagctccccagcgcactcctgcaatgcatcttttttttttttttttttttttttgagacggagtttcactcttgttgcccaggctggaatgcaatggcgcaatctcagctcaccacaacctctgcctcgcgggttcaagtgattctccttcctcagcctcccaagtacctgggattacaggcatgcaccaccacgcccagctaattttgtatttttagtagaaacgggtttctccatgttggtcaggctggtttcgaactcctgacctcagttgatcctcctgcctcagccttccaaagtgctgggattacaggtgtgagccactgtgcctggcccaatgcacctcttgaatcacctcctcatgctttgcttttagagaacatgatccccaacatgtgattccagcaaagattctagaaagccaaccgtgacaatcacttctgggtttagatgacccccccccaccacaagatggcagtgagcacctcatcacagaggtgctgatggtctgcagcaccgcgccaggccagaacgtgccttttacagaagaaaataacccagtagctgactaggatggtgaggagggctggtgagcactgcggtagtgagagggacactagcatcactgagatgcaagtgatggtcatttttcataggtcaaagctcaaagcaggggacagttacagggcagggcttcatagcaccagtgtgatgaaagtatctgggagtggctaaggccagcactatgccatgggaagcaaggtgggcctgaggaggaggcagcagcgtcagcctgcaacaagtgggggctgccctgcagagacctaagagtcatgttatagagcacagtgtctgtaaggccaagaagtgtggacagccaagtgtgtcaattactagacatactcaagaggagcaggaagggcagggcatggtggctcatgcctgtaatcccagctacttgggagactgaggaaggagaatcgcttgaacccgggaggtgaaaattgcaatgagccgagatttcgccactgcactccagcctgtgtgatgggagcgggactccatctcaaaacaaaaaaagaaaaaggaaaaagaaaaaaagaaaaacctaggtatacttctcaagcaaataaaaataatcaaaaccaatatcatgcccgggcacaaatttcatatatataacagatttaaatatatgagggtgattatcctctcatatctccatttttttttgtttttccatttttttctttactaaaaaaagttaatgccaatgacacacaatttttttttttttttttttttttgagatggagtctcacttcttcgccctggctggagtgcaatggcgtgatctcgactcactgcaaagtctgcctcctgggttcaagcaattctcctgcctcagcctcccaagtagctgggaccacaggagtgagccaccacacccagctaatttttgtatttttaatagagacggggtttcaccatattggccaggctggtctcaaactcctgatctcaaataatctgcccgcctcggcctcccaagattctgggattataggcgttgagccactgcgccccgcctatgtatgattttttttttaattttattttcataagtttttggggaacaggtggtattttgttacatgagtaatttctttagttgtgatttgtgagattttggttcacccatcaactgagaagtatacactgaacccaatttgtggtcttttatccctcacccccttcccaccctttcccccggagtccctgaagtccattgtatcattcttatgcctttgcatcttcatagcttagctcttgaacccttactttctgtttgagggagaagacatatcatctacaagtagatactgtgtaaacattccattgcatgactatcccataacttatttattatttgtgtttggttatttgctgctatgtaacaaccccactcccaactaaatggtgtgacaattccatgattctgtggatcaaaaattctgaaaagtcaaacccaaggagttttgtctctgctccatgatgctaaagcctccgcaggggtgaggcgaatggctcagggtgactgaaaagctcagggttggaacagctggggatgaggcctctatgtataagatgattcttcactcacaggtctgaaactatggtggggacagccagaaggctcggctcagctgggacagtcacctgagccctacacatgacctctccaacatggtgatcctgaagcagttgggtttcttacacagcatcacacttttcttttttttttttttttttgagatgaaatattgctctatcacccaggctggagtgcagtggcacgatctcagctcactgcagcctccgcctaccaggttcaagcgattctcctgctccagcctcccaagttgctgggattgcaggcgcctgccaccaagcccagctaatttttgtatttttagtagagacggggtttcaccttgttggccaggctagtcttgacctcttgacctcaggcgatccgcctgcctcggcctcccaaagtgctgggattacaggcatgagccaccgcgcccggccaaagctcacacttcttatgattcagccttagatgtcacatcagttcattttccccacacttattagtgttagaagtcacaagcccacccatactcaggggactggcacacagaccccactctcaatggaaggggtgggacaccaccattcctgctgatgggcatttgggtaacttcctgtttgaagctattaagattgggctgctgtggccgggcgcagtggctcacgcctctaatcccagcactttgggaggccgaggcgggcggatcacgaagtcaggagatcgagaccatcctggctaacacggtgaaaccccgtctttactaaaaataccaaaaaaaaaaaaaattagctgggcatggtagcgggcgcctgtagtcccagctactcgggaggctgaggcaggagaacggcgtgaacccgggaggcggagcttgcagtgagccgagattgtgccactgcactccagcctaggcgacagagcaagactccgtctccaaaaaaaaaaaaaaagattgggctgctgtgactattctagtaggtgtctttggtgagcgcctacacgtgtttctctttttctctttagtatatgcccaggaggggaactgctggctcccagataccgtatgttcagggtcacacacacttccacagggttttccaaagcccttgtaccagcacgcactcccagcacctgtgtgactgctccagctgtcccacagtctcatcagttctattgctgatattttcattttagcttaagttatatttaataggaaaattaccgttgcctctgccccccgttcctgcctgtaggagtttctcgtagctgttgctacaggtggccacaaatctgtcacttaaacccacacaaattgatgtccttatggctttggagtcagaagtgtcaactgaaggtactagcagggctgtactgacctggtggcctcagggagcatctgtgctgcttctccaccttctagaggctgctgcatccctcgctccagccccttcctgacaccactcaccctcctacttctgttatcacatcctcaccttctctgtgttcagggctccctctgtctctctcttgcaagcacacttgggattccattgagggccacccacataacccaggagaatttctccacctcaatatccttaacaactgcagagcccttttgccataaaagttaccattcacgggttccagggattgtgacatgggtagctttaggagtgattattcctgcctgtctcccgctcaccagaacttggactttctctctcaacaggagccccctgtgtgggaatagcctgtctcaacgacgccctctataaggacctgcttcctcaaaggacctcatagtcgggtcctgcccctcagtgtccagtctgccttggctggaggggctgcaggggtgtgttggcgccacctggtggagacagggcatcacagcaggtgggagcccagtagaagcacaaccaaaacatgggtaatgtttaaaattttctggctaagcgctgtggctcacgcctgtaattccagcactttgggaggccgaggtgggtggatcacatgaggacgggagtttgagaccagcctggccaacatggtgaaacatcccctctactaaaaaatacagaaaaattagctggacatgtggcgcgctcctgtaatcccagctactcgagaggctgagacacgagaatcgcttcaaccccggaggggttgccgagatcgcgccactgcactccaggctgggcgatagagcgagactctgtctcaaaaaaaaaaaaagaagaggggaggcgaggggaggggaggggaaaagggggaatttgtttggagctgagacatccatcttctcctgacctcagatatttgcactcctggttatgaagccttcacacttggactgaatacaccaccagctttcccgatttccagcgtgcaaatggcagatcgtgagacttctcagcttccataattacatgagccaatttatatatataaattgggtcctccagaaaaacagaataaattatatatataattatacgcataacttaattaaattatacgtataacttagctatatatataatttattctgtttttctgaagaaccctactgacacaaatgttgagcatcttttcatgtgcttattggcttaataacttgtacatcttctttggggaaatgtctattcaagttctttgcccattttgtaactgaactattaatatttgtctttacattgttgagttgtaaaagttccttatatattctagatactagagccttatcagatatatttctgcaactattttctcctaatatataggttgtgtttttattttctttttctttttttttttattgagacagtctcactctgtcacccaggctggagtgcagtggcatgatcttggctcactgcagactcgacctgccaggctcaagcaattctcccacttcagcctcctgagtagctgaggttataggcacttgccatcgcacccagctaatttttgtattttttagtagagccgaggtttcgccatgttgcctaggttggtcttgaactccctgcctcaaagcgatctgtcagcctcagtctccctaagtgctggaagtacaggtgtgagccacagtgcccggccatctattttcaatagtgttttttgatgtacacaggtttggaattttgataatgttcaattcatccatttttttttttttttttttggttctttctactggaccaccactcttgagccctctaatccaacctccacgcggcagccagagggagctctctaaatgtaattactctttccctgctccacctgctcaaaacagtgtcacatttgtgatttaaaacagtatttctcaaacctaatttgcaaacaaagcaggtggaactcttcttgtatgcacagcatctgatttggttggtctggcatgggtctgggagtgagcacacctaccaagcggctgctggggtaacttgcgttttccactgatgatttcagcaatgtttccggtcccacatgctcctccagaaccttgtactcccccatgaaaaggtggagtccatttccccttcctttatttatttttttgagacgaagtttcactcttgttgcccaggctggagcgcaatggcgtgatctcagctcaccgcaacctccgcctcctgggttcaagcaatgcttctacctcagcctcccgagtagctgggattacaggtatgtgccaccacgcccagctaattttgtatttttagtagagacggggtttctccatgtcggccaggctggtctcaaactcccgacctcaggtgatccgcccgcctcagcctcccaaagtgctgggattacaggcgggagccaccgcgcccggctatttccccttcctttgaacctgatcaggacttgacgatggcatcaacatggtgagagtgaccctgcatggcttatgaggctgggttacacaaggcgatgttgcttctgactggctccctctcaggatacatgcccttggaacccatcctctaagctccttgggagcccaacttagcccatgtggagacaagacagggagagaaacagaggcacccccagccctcagccagcatcaaccgccagacaggagagcaaatgcgccaacaatgattccagctgaagcctcagacagcgtggagcagagatgagggatccctgcagattgcagatgcgtgagcaaaatgcatgctgtcactgttttgaaacaacaatgtctgggggctgtttgttatgcagcaatagacagctgtaacaatgctgttactgctgtattccatgaatgactgcactttgagtagcagggggctagatcactagataagccccatggcttctgtgtatgctatttttctacttttatatccttttcattcactttttttttttttttttttgagacagagtctcactctgttgcccaggtgggagtgcagtggtgcaatcttggcggactgcaacctccacttcccgggttcaagcaattattgtgcctcagcctcctgagtagctgcgactatagatgcacccccatgcctggctagtttccgtatttttagtagagacggggttttgccatgttggccaggctgatctcagactcctgacctcaggtgatccacccaccttggcctcccaaagtgctgggattacaggcgtgaaccactgcacccagcctcattcactttctttacttggctcatttttccttgttgcctcaattctcctctaagatcactttcctgacatttcagcctgggcctgttgccttctctgggtcccctccgcctcctgtgcctcccccatctcagccttgatccctcagattatacttcctctgtccccaccctgaccatcttggctgtccctggatagggatgggtatcttctcccactggtctgggagatctggaaggacaggcctggaaaagacttggtcactgctggaaggagctcagttagtgtggtgctgaggacagtacgggtgaggctggccccttcacccaaactcccactctcttccatagatttcacctctgtggcccaggccataggattagggcaactccccttaaacatcgagtccatcctccaagctgtccttttttttttttttttttttttttttgagacagagtctcgctctgttgcccaggctggagtgcagtggcgcgatctcggctcactgcaagctccacctccagggttcactccattctcctgcctcagcctcccgagtagctgggactacaggagcctgccaccacacccggctaattttttgtatttttagttgagacggggtttcaccgtgttagtcaggatggtctcgatctcctgacctcgtgatccgcccgcctcggcctcccaaagtgctgggattacaggcgtgagccatcgcgcccggcctcatgctgttcttgaatagtgagcacctgttacaagtcgccccaccagcctctcacttgtacccccctcatctctttctccccaagagacagaggaccctggcacttgtgaagcatgacccagaccctggggccatggcatccaacatcctcattccccatgacccctactgtctagatgtagctgccaagagacccccagactccccgggcctctgtctagagtgccaagacagagagagaatgccctgccgcttgcatgctttgtggggtgtccttcccccttccctggctgctaggcgtgacttcaacgttctccccaacccccaaacagcagcactgacaccagctgcagacctggctcaggttagctaatgaggaccaggctggggatggagcctgaacccctaaaccccagtcctgtaccccaccctaatcctggggtctccactggacaaaacgaagcagcttggtttttcgttgttattgtttttgagatagagtatctctctgtctcccaggttggagtgcagtggcgtgatctcagctcactgcagcctccgcctcccgggttcaagtgattcttgtgccgcagcctccccagtagctgggattacaggcgcgtgccaccacacccagctaatttttgtatttttagtagagacagggtttcaccatgttggccaggctggtctgaaactcctgacctcaagtgatttcccagcctcggcctcccaaagtggaagcggcttatttttaaggagaaaactcccgtggaaaggaatcagcacctcctctgtcaacatttcacttctctgaaaagactctcacttccaacagaaagtgctttgtaacacaacaatgaggctgggcgaggtggctcatgcctgtaatcccagcactttgggaagctgaggcgagtggatcacgaggtcagaagttcgagaccagcctgaccaatatggtgaaaccccgtctctactaaaaatacaaaaattagttccgtgtggtggcgtgagcctgtaatcccagctactcaggaggctgaggcaggagaatggcttgaacccaggagatggaggttgcaatgagccgagatcacgccactgcactccagcctgggcaacagagtgagactccgtctcaaaaaaaaaaaaaaaagaatgagaacatatggacacagggaggggaacaatacacacaaacaaaatttagaaacaggtgaaaataattttagtaatatttttactaatactgatatgctcaaaatattattatttcaataagtaatctaaaaattattgagatgtcttatgttcttttcatcatactaagcctttaatatttggtgtgtattttacactcacagcacatctcaatttgcagtccccatgtttcaagcactaaataaccatgtgtgtccggtggctaccatactggacagcgttgatctgaaatcgcatctgtatgcatcaccagcatatttgcagagatccccatctcagcagcacacctgaggctcatctgcgaaagcacctgcaacttctctacaacctcccacatcacctccaaacacatcctcatgtcatctgcaaacacacccatagctcacaggccaatgcctaaatatcattgcaggcaccttcagagaaagcacttactaaaggggtatacttgattccacatctgctttgacctgcaaatctcccttctcctttacatacatttgcatctcatttgtatgtcaatctaaatccactggcagagcctcagatcatcatctcaaagtcaggtggatgtggggctgggcaggcctccaggtgttcctcctcctgcttcctctggggctcttgatcctcctcctcttccttgctgctctcctcctcctcctccaatatggtgaccagttcctcccgcagcgcccccatctccagccccaggctgcacagctgtcccagcagctggacatccactcggcgcaggttcccctgccagtaggaaggggacgtcacagggatgccaccccagagagcaaggggtctctccaggacctgggtgagagcaggtcccaactcatgtcctggccacagcgcctgggcagggtcctcactgtgcccatggaccctaactgccttcctgcttctcagagtgtctcttgatctctaactcttctctttgtctctccatttcattgtccctgacttctctctctctgtctcctccctctcttatctatatctgtccctgtttccctttgtctctgtccccatttattttttgtctttccatgcccctgtctctctgtctttatgtgttgccatttctctgcccctgcctttggctctctttctctcgcttgccctctctctgccctccccaactttctcaaattcagtctgtctctccatctctgttcctgctctccgtctctgcttcccacctctgtccctctcttttgggatctccctgtccccacctctgttcccgtccctcactctatgtctgtctctcggtgtctgtacatgcctctcatgtctctgcttctatctctcagattctgtttttcgatctctggccttctctatttttgttcatttccattcattctcatttcctctctttctctttcccttccaaacccctcactcaccagctcctccctgatccacagcagactatcgcaggcacctccagtgtctgcccctgcagtcctgagggtctgaccagggatttccactggggagacctccctcagggcctgggggggtgggcccagccccggaggcaccagtccagcctgattcagctgcctccacagttccatcgtctctgagctatggctgcaaggagcaggaagtagcaaggtccagggtggcctggtcccctggggagctgtgtgcgtggtggagagtaaagggcagagggagtgggatgggggttcctgggaaaggtatcccaaagtccactcttcagagagaatcagctggccttgtgcttttctttttccttctgaagtctaacctcaactctgctcacagggttcaaacatagcctcttgcagaggtctaactccacccttccctgcctgtctcaggcctgacccctcaggggcgctcagtgtctgtagatgcctggcaccctctgtccttccacctgccccccaccaccacttctccagcctctcctcagcctccatttgacctctggcttgcccatagcttggtccttgcttgtcctcttggcacgggtcatcctagggctttcccaccagtgtgcctttgggggcaggaatggctcccaggggcaccaagacagcaatcccttagctggagtgcctgtgtccaggctgctggcctagggccaagcagccaattctgctgaccctggacttgcctatgggtatattatccctgttgagggtgagggcttctgctgtggaaaagtctgggaagcactgcaggcctctctcggccttggacccttccttcagacccaaggtgcatatatatacatatatataatggtagatcacgaggtcaggagatcaagaccatcctggccacatggtgaaaccccgtctctagtaaaacacaaaaaattagccgggcatgctgccgcgtgcctgtagtcccagctactcgggaggctgaggcaggagaatggtgtgaacccaggaggtggaggttgcagtaagccaagatcacgccactgcattccagcctggcgacagagcaagactccatcttaaaataaacaaatgaacaatatatatatatatgtattttgttttttgagacagagtctcgctctgtcatccaggctggactgcagtggtgcaatcttggctcactgcaacctccgcctcccgggttcaagcgattcccctgcctcagcctcctgaacagctggggttacaggtgcacgccaccacacctggcgaatttttgtatgtttagtggagacggggtttcaccatgttagccaggctggtctcaaacccctgacctcaggtgatctgcccacctcggcctcccaaagtgctgggattacaggcgtgagccaacgcgcccagccccaagtcccttttaccatagaaagtaacatagtcacagtgcccagggattcacaggtatggggagagggttcgttattcagctgccacacccaccttcctaaacctgctgcccttccagtttcctcacgtgcacagccacgcccgtctgcttttagtttctcaatctgttggcttaaccttcaaaacaggcccaggatttgagcacttctcaccattccctctgccccatccccattcatctcttgcctagactgctacagcagcctcttttactggtcccctgcatccacccttgccctctaaggcaagggtccccagtccctgggccaaggaccagtaccagcccctcgcctgctaggaactgggccgcacagcaagagatgagcagcgggtaagtgagcattaccgcctgagctccgcctcctgtcacatcagcagtggcattagattctcataggaggcaaaccctattgtgaactgtgcgtgcgggggatctaggttgcctgctccttatgagaatctaatgcctgatgatctcaggtggaacagtttcatcccaaaaccatccccaccccacccccgacccccagtctatggaaaaattgtcctccacgaaaccagtccctggtaacaaaacggttagggaccgctgctctaaggtacattctccacctggcagaaataatctttacaaaatgtaaatccgattttgacactcccttcttcccactgtgaatagaataaaaccctaccaggcctgcaccgtcagcccctgcccacctctcaacccagtctcctatctctgtctgcaagctggttcccacctcaaggcctctctgctctagaggctacctctccctgcagcgcttttcccctagatctttgaatggctctttccttatcattcacttctacttcaatgtcacctcttcagagaggcctttgctgatggccctacacccagtcacttttttttatctgcttctcatcaaaattgccttgctgattcctttgtttcttattcatcctctcccacatccatcctctcccagcccagaatgttgacttcctgagagagggactgggtctgtcctgctcaccatggtaacctcggcatctagaacagtgcctgccatcacgtggtaggtgctcagtaaatattcttggaactaatgaatgaataattctatccacaagacttcacaatggctcttcatgctgcgatctagctttcaactccaaactggtcttgagatctcacctcagtctctaaccttgacatctaacctcttcacccactctcttacctgaccctaatttttaaaaatgacgtggtcagcttttcagccccctcattccctgtttttaggaggtagtgagtggaagctggaagaataagaaagcttggggagactgcaattgcagtcaggaaagaaaggtactctgccgggaagaacaccccatcttctcctagggaaagattgtggagtcctggggtttgttttgtttttcaattttttgttttaagagacagcgtctcgctctgtcacccaggctggagtgcagtggcgcaatcacagctcactgcaacttcgacctccccggctcaagtgatccccccgcctcagcctcgtgagtagctgggaccacaggcgtgcaccaccacgcccggctaacattttattttttgtggatataaggttgccctatttctttgtggagataaaggctcccctatgttgcccaggctggtctcgaactcctggcttcaagcgatgctttcgcctcggcctccacaaagtgctgggttcacaggtgcgtgagcccgacctgtgtctcgttttgaagctcagggagagggcgctgtgagcaatccctaaaccctttaagagtaaaaagtgcgtgcacctttaagaggacggttagaaaacgcggggcgtggccacaggagaataagttcgcgctgaaccaggagcgtgggataagaccggccccttccggttacgaaaccttagcaagatggcggctccctgggcgtccctgcgcctggtcgcccccatgtggaatgggcgtatcaggggcatccatcgcctgggtgcggcagtggccccagagggcaatcagaagaagaaaaggacaatactccagttcctgaccaactatttctacgatgtggaggctctgagggattacttgctccaaagggagatgtacaaggtgcatgagaaaaatcgatcttacacctggctggagaagcaacatggtccatacggcgcaggtgcctttttcatcctgaagcagggaggcgcagtcaagtttcgagacaaggagtggatcaggccagataagtatggccatttctctcaggagttctggaatttctgtgaagtgcctgtcgaagctgtggatgccggtgactgtgacatcaactacgagggcctggataacctcctccgcctgaaggagctccagtccttgtcgctgcagcgctgctgccacgtggacgactggtgtctcagccgcctctacccactggccgactcgttgcaggagctctcgctggccggttgcccccgcatctccgaacggggcctcgcctgcctccaccacctccagaacctccgcaggctggacatctcggacctccctgccgtgtccaaccctggcctcactcagatattggtggaggagatgctgcccaattgcgaggttgtgggagtcgactgggctgagggcctgaagtcagggccggaggagcagcctcgggacacagccagccctgtccctgcctagcctttagccctgtccccactcacgtggcttctcagcgggctgcatggaatgtctggtagctcaccacacttctggcttccatttgtcttcactcaacgtcagggtgggggagtggtgctggccaatcacaggagagagcgtgagttcccagtatttattcctggctgcccttggctaaaggtcacagctcctgtcaccctgtcaggcagccctttccatgcccctgttcaggcctggggaggtaaaggctcaggctgttagtagccgcagagagccacactcaccttgtcaggagactcttctcaaactgtccttatgtgagtgcactgccatttcttgcagggaccctgactgacacaggggctactactgacactttacagggatggttctcccccgtgcagggccgctgtgcccactgcaggacatgcagcatccttcgccccactccactcactaaaggccagcgcaccccaggccccatagtattgctggttatggatttattgactttatgttccaaattcagctttttcagttggctgttttttgaaaggggataagctttgtcagtagagggcaccgaacaggcattataggaggaaaggcgcctccttcgtggttcttgttggttgtgcttctgcctctggacgccgcagtgcatgtggcttccccagcacccagctcctgaagcaccaggcggtcagcagctgcccttggcaccctccagccctcagaagttgcgtaggagacacagcgcctccactgaggcacctctctgggaataacgttccccagcaccccaaatggatttccagtcaattcagaagcattttaccagtgaagccctcattattccagttcactgttaaagccagtaattctctatattaaactttccctgttcggtttatggagtataaaccgaacagggtcttgggaagggacagtgtctaagtgtctgggtgccatccagagcatttggcaggggcagctgcaggatgagtgtgttcccaggggagtgagagcagcagctatatggcacttgtttgctactgccctctttttttctttttgccaaacctgaggtgactagtgtcacaggtggagcccatctcaca

SEQ ID NO: 735297 - DNA, 188421 bp, Homo sapiens
ctccaaggctgagggatgaggagacctgctgaggacccagggccttatctttccatcccactccataggtcccagtattgactgatgctgtcttcacctcctagcctcacttttaaccttctggcacccgcccaccactgtccagttcactattgaagccctgccgtccagtgctgcagagggaaaggatgttcttctactggcctgcaatatttcagaaactattcaagcctattattggcacaaggggaaaacggcagaagggagccctctcattgctggttatataacagacattcaagcaaatatcccaggggccgcatacagtggtcgagagacagtataccccaatggatccctgctgttccaaaacatcaccctggaggacgcaggatcctacaccctacgaaccataaatgccagttacgactctgaccaagcaactggccagctccacgtacaccgtgagtgattcccccatacctctgggtgctggcggtcagttctgcttcacacacatgagattgtcaggcctgggctgtgcctgcatccccctctgcattttgtcccgtgttgagatttgggcatttagtgcaggacacacacatggtaggtaaacttcaacagatcagaattcctttcctgcatccaggccctgcagacactgatggcgggggcgggggggcctcagcagggggaggtcagtctcagccaagcaccccatgccctccccatgaacctgaccctgagaaagaccctggagaactgggtcagggcctggcctgagggcgtcctgggaacctcacaaaagcccagcctcaggactcctgactccgtgtgaccccgggaagcctgtgtcagggctggggtgtggtctcctgggcagggcttactgggagcaaggatttaccagatgtctgcgggctgtggttcctgaagcttctcatcagtgagggctcagctcccagagtctcatctagacaaggacagagcctaccactttccctgggactcagcctggagagggcagggggacaggattactagggcattggccccctgaatgaggagcttaagagatgcccttgggcagtcagtggcccaggggtaggaacagaggggagaaaatgttcctggcagcttcttgtccaccggggatcatgcccaggggtgctctcccatggaggcaaataacagatgctgttgatgtgaacacctcctctgtgccaagcttcatgtcagatcctgtgaataatttaaagttcattcacagacaaagtggcaagcctcagaccattttccatttacatattgtatggaggggaaactgaggcacagagagatacagacaccggccacggtgggcagatcgcagctggcagagtcacatgagggctgtctgcagctgctgccacgtcctctccttcatccctggtgccttactaggtgtctgtggaccttagaacagccactggttcggatgttttcttcttaggtgtctacagctcggagggggagattctggtctggagagttatgagtaaatacagaattaatcagttttttcttaactaaatcacctgcctcaacaatcagtcagtgctggggaagttcaggcctcctcgctcaggtccacaccccgcatctctggacatgaaatggcttcgtgtgttttctgatgtgtgggtatcattccaacaggaggataaaggggaggactttgctttctctccccattcacaccctgcaccagccagggcccagtgtgagacacatactccgtagttctctcatgaaggagggagggaatgaatgaaggaatgatctataacctcttcagagacagagacctggatacaagatcctaggaggttctgggcccaacgtgagacacacactctgtagttctcttatgaaggagggagggattgaatgtaggaatgatctataacctcttcagagacagagatgtggatacaagatcctaggaggttctggccacacctgttttctgtccctctagagcctaagacccatgtctcattcatctggcccgtttctcctaaatctgcccctgggagctgagtctcatctgaccctggggctgcagggctgtgggaaggttttcaggggagggatcaggcttgcgggtagtcccacacgtttgccttacaccctggagctctacctggttctcactatgaatatcccataataatcccccctatcctttctggggagtagaaaaaaagtaaatatttaaaaatatgccagagcatctgttcttcttagcaagttcagatagttattagttagcaggaataaatcgttattttaccagagcctcacctgctgggggtttatgggagcctaactgactgaggggggtgggaaatatccaactccagccccctctagccatcatgtcccacctaaaggagagaaaaaactgagaggcacttgtgacattcacagcccagggcacagactctatccaggaccacagaacccctccctccccccactcaccaccgcatcactgaacgcctgctcacccaagttcctgttgcccagtacatcatgtcctggctttcaacaaaaactacaagacagactagaggcaaaaaaaaaaaaaaaaaaaatgcagttcgaaagacagaacaagcatcagaaccagatgcagatgtggcagggatgtggcagggatgttgaaattatcagaccaggaatttaaaacaactctggggccaggagcggtggctcatgcctgtaatcccagcatttgggaggccgaggcaggcagatcacctgaggtcaggagttcgataccagcctggccaacatggcaaaaccccgtctctactaaaaatacaaaaaattaggcaggcatggtggtgggtgcctgtaatcctagatactcggaaggctgaggcaggagaattgcttgaacctgtgaagcggaggttgcggtgagcctagattgtgccactgcactccagcctgggcaacagagcgagattccatctctaaaacaaacaaacaaaaaacaatactggctaatatgctaaaggctgcaatggaaagcatagacaatgtgcagaacagacggatgctgtgagcagagagatggacaggctaagaaagaataacaacagctactatatctatctatctatctatctatctatctatctatctatctatctatctatatatatgtatatatatgctagagatcaaactcactgtaacacctggatctcagagtggttgtgaggatgtttattaggagattaaagagattaaagcagagttatacacagggcgagagctcaactgatgctatcaactagtattcttatttttttgatgttgttattggcaataaaatcaggaacaatgcagtaaaaatttggttttatcatgtacgagttctgtgaccttccttgacttactgaggtactgtaagtctcagattctaactctgcagatggcggtgatgcccctctccctcaaggtgatgtgaggatgagatgagctgtaggtaggttggtgcccactgtgcctggcacatggaaggcccctgaaaatagtcaatgaacatcatccccgctcatcagcatggagttgacagtgagggctcgctctctgtgacaatcatggaatggaaaagaagaaacaagaggaagactgggcgcagtggctcatgcctgtaatcccagcactttgggaggccgaggcgggcagatcatctgaggtcaggagttcaagaccagcctggacaacatggcgaaatttcatctctactaaaaatataaaaattagcctggcatggtggcacaaacctgtaatcccagctacttgggaggctgaggcaagagaatcgcttgaacttgggagatggaggttgcagtgagccgagattgcgtcagtgcactccagtctgggtgacagagcaagactccatccaaaaaaaaaagaaaaagaaaaaagcaacagagggaagaggtgtgacatgagaggaagaagggatttaaaggtacaggagcagggcgaggtgcaagcacctgtgggagaatgtaggagttggtacatcccagtgtgtcaagtctgagacacagaaaatggtgcaaccgtggagagcaagggagtcagctatgaggacagcccaacagaccacactcaggctctggagcatttccttcctccctgactatgcccctgccctgcaatgccccttatggtttcccttggaacaaacttgggccttgtcccctttgccttcccctttctgcagaaaacaacgtcccaggccttcctgtgggggccgtcgctggcatcgtgactggggtcctggttggggtggctctggtggccgccctggtgtgttttctgcttctctccaggactggaaggtaccgcagcttttccccagcctcctcccacccctaggctgaccccagtcagggaggagggagaccccgccctgtattcagggccaggctttccgcatcctcccaaggaatccttccctctcattccatggctcctcccttgccagctgctgatcctaggctgcctcttcctttatgaatgtggcacagttaaggttgcacccctgagtgctgtcctagttccctaacacagcaaagccacagctgcctggagggaggaagggagggagggagggagggagataagacgggagtgctcagaacctggtaccttctgctgttcattgaatttacccacccagtgaggagggatttgcaggcttgagatccatggtgggggtcctgggcatggtcacgcagtggggagtggcaaagcctggacaggctgggtagggtcagcaccccatcgtgattgatgtccctgaggtgtgagatgggagaacctggacctcaggacctgctgtcctttatgtctcttgccaaggggtggagagagagaggacaaggccattgccccatttcagcatctccaggcctgaaaggagggtctggccatggcagggatactgagttctgggagaatatgatacatgctccttgcctccccatgcccccagctcccccagtgtcctgcacacacagccggccctgctttccctctggggccttgacccttcctctcaggcaaacgcaggtggtctgattccctccctgagtcctcagtccctttcctgggtccctgggtcaatgttctcctcacccggcatctgcctgggggggtccttcctctctggccaggacagacgtgactgcttaaggcctatcctcagctccccgtcctcggccgctcctaccacgaaactgatggagacaggaggccttcactccagtccttgaaaatggagtcccttccttgtcctttattctgcccctaaacctgtgatttctccctgcaccctcatgaataatcctgacctttcctagggccagcatccagcgtgacctcagggagcagccgcccccagcctccacccctggtgagtgtcccttcagcccaggtgtgggagcccctaggcctgccctacggtgtccactcctgccagtcaccccctgggggcctctgaccctttctttggggctgcaaggaggatgtcaggaaacatgacacaggggaccccgactgtcttgttcagactgatctgtgggctctgggtcgtgggtcacctcctcgacctcagctgctcaggtctcccctgggaagaggctccctctccctgattctctgggagctgaggacccctacactctcctgcaggaggggcccaggctctcctcccaccctgctgctcactcctgtctctgtccccaggccatggtccctctcacagatccaccttctcggtaagcctgttccctccccagcccttttctactggggtcccaacagtgcaggctcagggcagggggaccatcaaccccacagcacagcactgacccacctttccccagaacagtcaggtcaaagtgagtgcctccagccaggatccgggcctctctacagggccaggaccacccacgccatgtgctgacccctccccgggaccctctacacctgaggagaaccctggagtccagcaggtgcagaatggacactgggaccatcagtcagaggcccacattaacaagggtgcggggtgggcccagccaggacaggggtcagggtgttgtgtccacactgggaggctgagctcaggggcagagctggtcaatcctgaggggaaatgagtggaagtggaggcagggaagtaagtcctggccgatcagagacaggaaccttccaggctgggcttccgtgaccctccctccctgtcccctgacatctcctctctcccctgcccaggcccctctacccagccccagaacagccactcccatctatgaggtgagtgtgggccatggatgttctggtcccgcaggctccaggggacccaggatctgcccccaccagcacctggctgagctcagattcaggaaaatgcagtgaaaatgagaacaggtggtggtgagcagaggagggaggggcctgggaacagggaccccctgagcacagccaggttcagccccagagaagccctgggtgggcccagagcctgggagatgccagacactgttctgagaaggctacaggggttgaggcctcttctctgtttttacaggaattgctatactctgatgcaaacatttactgccagatcgaccacaaagcagatgtggtctcttaggttcctctgggagctgctcttgtgggttgatggagcgtccccaaagctcccagccctggggacggggaaggacatggagcctgagccagagaaccagctctgagtcctgaggagacacaggcctggggacagggagggatgggagtccctgctgaatatctggagaccctgacaggttgccctgggctctgggtgggccgggacaaaggcctctcatcaccacaggaagcgggggcttgcaaggaaagtgaatgggcctgtggcccacccggggtcaccaggaaaggatctgaataaagaggacccttcctctcattggctctttttctgctcacgggaacttagcagaaactcacctgaaactccgtgtccattctctcccgggtcacacagggaaaatatctccaccttgtctcaaccacagtctctcttccctgggaggcagaaataggggttgggagtcaggctggggtgggccctacacaggaaagggcaagattcacatgagccctgcccagccagccgagcgctcagctgtcctcacactaccccagggaccaaggccatgcacagccccagcctgggtccctctgtgaatgcatgtggggtctcaggagcacagaagatggggccatctgatgtccacaaaaggtgagcaatgcgggagcaaccatgggtggtataggttgcggctgtggcccctacgcagcctccagtgtcctgacccctgctgccctcttcacccaggccctggaggcccagtctatcactgtcctccacaaatgaacttacctgtccccaaatccaggatcctgtgtgcttatacctggccactaggttctcctctgtcccagtggctactgctcaggacatctttatccctggtggggcacagagaggggctgtcagagcaaccaagattaatacagacgcataattcagtccttgagcactacccaggactctggcccctcattgctcatcagttcccactttaccccctggcatggatctcactgagcaagccaactctttacacaggagcatccaggtcagaggtgcaggactcccccatctaaagctcatgcaggctcccatggcgatgggacaacctgtctgctcctctccctggcccacagccctatctcgcctgcagctcctccacacacctgggacagcagttctcagcccttccctgagggcccctggaagggtgatgatctcatataggttcacttgaaccaggtgccaccttcccacaagtgagctggtgcctgcactaaagcacagagccacagttcccaagagtgttctgccactgccacaggtcccaagagtgttctgccactgccacaggttgttcgtcctgagatgagaggtaagaaaacaacccgcaatgggttgttttatatcgggatttgcatcaggatttagctctaaatgacccctgatcccacctgcacacagcgtcagatgagacaaggtgaggcctctttagttttctgttgaggctgtgacaaattaccacaagcttagtgacatagaaacctgaaccaaagtgcccacatggctgtgttctttctagaggctccagggaagagtgcatttcctctccttttccacctcctagaggcctcctgcaaccttggctgtgtcctctttctccatcttcaaagccagcagcacagcatcttgaaactattctgtgccctgcttccatccccacatctccacctcctcccacctccctctctcacttaaaaggaaggagccttgtggttattttggacgcacctgggataaaccacaacaacctccccatctcatgatccttcctttaatctgtaaagtgtcctttaccacgtgacatgtccacagatctggggatgaggatgtacacatctttgagaggcccttgttctgtccatcactcctctcaaggccatcttctcatcatcgttcactacaaactacacatgggcacctggatgggttcatcatgactgtggcgtcagttcctgcattaacatccccagcaccctccagatcctgagagagggagacggagggctctccatgcccctagtacctctccaccttcttcttggtgacatgcttagttgctaagaataacagaaagcggaggtgactgaaagatcacaactcaccggcccttcaatagttcgtggacatcagcaccacggacagtgactcagtgaggctaatttccaggtggcagcagggagcatgcagataggagggaactgcaggaaaagctgcccattctattctatatgagaaagagtgtaagaaagaggaagctattacagggataatgctattcttctctaatccataaattgcgaaacctttgcatgtctggatatcatggtttttagcacatctgctgccactccctgcagggctgattgctgcatccaggatgtggtctcttggggggctcacagcctgctttggcctcatggtgagtctccctgcccctgacactcaggccactgtctctgcctacaacatggtgggaaccttccatgattaacgtctgattctctgtgcctgacctttgaagcacatccatcactcagcctggagcatccgctgagctcagcatcctgctcctccatccccagctgagcccttgaggagatgcttgagaggatctcctgggctcctctgtgagctcctccaggctgagccttgtgcttggtgtcagaggcctttgccatctgcttgttctttccataggcaaataatcctcctcagggacaagtggggcctgaagatctgtctgaatatctatctatctatctatctatctatctatctatctatctatctatcatctatctatatgtatgtatatatgagaatgctttattaggcaaaactgcatactatgaacatgctttaaaatgcaacaggatgagatgtgaagacataaagaacaagtgtgtagtgacacatggctatcagaacacactgaagaatccacaccgcggccgagagcagtggctcacgcctgtagtcccagcacttttggaggctgaggcaggcagatcacttgaggacaggtgttcgagaccagcctgaccaacatggtgaaaccccatctctactaaaaatacaaaaaatttagccgggcctggtggctcatgcctgtagtcctggctgttcgggaggctgaggcaggagaattgcctgaacctgggagacacaagttgcagtgagctgagatcgcaccactgcactccagcctgggagatagagtgaggctccatctaaaaacaaaacaaaacaaaaagaatccacactgcttccccgcttcactttacccagaaaaggaatgttctaggccacttcctcttcagcacacatccccagggaactaaaataggttcacagtcacccccatcttcctcattcccatcacctcttacccacagaggcatctctggtcctacagatccagccctgccttcaagaggcacaggtccaacccatccagtgtccctgctagtcacacacagcactcagggtacaatggagggcttctgtgctttggatgggaacaaaccccacctcacattcccacacctgagaagccaccagggtcctctctgtcctgtcctcacactcaatgtctgtcctgggtcacccttgtcatctctcctggaaataggcatggctcctgacaggtaggattgaggctttgtcttttcaggagtccctcccactctgagcacatgaaactgctcagctccatgcaaccctctctcaccaggggccttgttctctgggtccctgaatacctgggtccatgccatgtacattttaagaaaaatgacagtgactctcaccctgacatcctcacccaaggcacgtgtctgacaagaatcaccaggtgagatacctgtggctccacacacctgaggcttcactgcgcaggggtgtcctcatccctctcctcccacccctagggacagtaagcaccacaggctgccttggaccaccagctccccctcccagacacagcctcagatctatactgacatgctacatggagaggctctgatgaacagcaggtattaggaaatcccaccgaaccaggtgccacttgcggccccactcctcctcatatctgtgactgggacagacacacataacacacctctgttcaccgcccagcccccaaggtcaatcacagtctgcttctcccctagatccactgctccccatgtcttccgtcctcagctgcatcctgggtggcctccttgctgttcttgtaccccagaggcaggttccaacctttgtgatgttgcctgcaatgcccaaactttcccttccccttccccttcccttttcccctcccccttcccctccccttcccctccccacccctatcccttcgtcttcccttgtcttcccttcccttccctataaagccaaacatacccatccacctaccttgtggtcaaagtcatcagcctcctgctccactcagtgttctctgaccctgcatatggaggtggtggcccctcctagaacacccaccactcactgtcagccttgcgtggtaatcacagattttgcaggggttacctgtgttcaggtgtgtcacctgtggaaccagaactcttggaaggactggcagagggagctgcttaggatatctcagggctcctggcatctggtctaccacagggctattaacaacagcacttagggacaaggtggaggatggacggttaagagggtaaatatggatgatgtgtgggcaaagaataggacacaggaacacatgcagtactcaaataattatgccaagaaaggtgaggacatggagatggacattcccatatacttctgatgggactgcagtttagtccctacagcaacattgacctcatcatgtttaacgcgcacacgctctgaccactatcctacttctgaaggcctccctgtgctgtgagctctgagaaggccaagcttgcctgttctgtctctgctaaagccagagaccagccaatagcccagcacagggtacttcataaatacatgttgaaggaatgagctccaggaacagtactccacatggtagagatgtgtgtatgaggatgttcactgcagaaggtcatgtcaatgtgacaagtgacgagcagcctcaaatccagcaacaggggtgtgggtaaaagatcatagtgtagccatgcaatggaaccaatgaaaaaaccacaattagagcaaatccacatgtattaataaaggaggtgccctccatacatgctgcacctaacagaatgttgccaaataagaatgaaaaatgatgatatttgggctgtaaaaactagaagtcagctaaataagaatgcatcgaaagtatttgtgaatgcttacaattttataatgccttggcatccgttttggatggaagttggactttctcataccagaagcagggctcagtcacctttgaaatagtttccagttctccacctccttccagttcctcagtgtgattgatcagatatctgatttatacaactgcctcctggtgacctcctccctatgggacttccggatacagcccgtatgactgccccactgaccccacaccctgcctgctgcagtgaccacctctaattacctggatctcatgtctgcttgcattaaatccaccaattaaaactccctgaggacaatctgtttgaataatattctgtaccctaataaaggccttgacccatgggttccccctctgtcctccccatactgcccctgacctctgtgtgtgtgtgtgggtgtgggtgtatgtgtgtgtgtgtgtgtgtgtcctccagacagggcctgtatcccccaggacctgtaagtaataaatctttattttcatcttatgtctctcgcaatcattggcaagagctctgcatcttaaagatcgcaaatttaagaaattggtgtagtcggcacaatagagtacctcttctgtttagcacaagatatctcggagctgctgaggcttttaacatcctcgccggtgtggctgcctcactggtgaggccgttctgttcagtgcaattcagttgctccactgtgtgctgctgtgttgctgctgtagagtgctgccatgttgttctccccaaattgttaccgagtaggaacctgtaatgtgctcccaaggtggtctaccccatgagaagggggattctccatctagggcaagggctaggtgtgtttctggaatcctaatagggaaggcatccacagagggtgaactccactcctccttagagtgaggagtgacatttcccatttattttccccatggaggtgccatgtattgactttttctttcactgtcccaaggttgagccaaggtgagctatggagaccagggcaagataccatttctgttagcaaagcaaatgggtgacaacgtgtggagaagctgtggttctcctgatggatatagcagagtgccatttagtaaaatcttgtcaggaggctgcccctggttagaccggcagtgtctgtagtcactaaggtggatgcgaattttaggccctgggccatggataatccctgcagacacagccgtggcttcatgtgatggggcaatcccgggctagtggctcccttgtttctgcatttcttgctgtggttgcacaatcaacacctcaggggttgattgggtcaccttggaaagagaaacagctgcctaggaggctggtgcacatggaggccaccctcaattttattctgctaacaagttgtaagattaaaacaacagggggctttgggtaccatcaggaacttgtcaagtaaacatccaaagacagaaagaagaaaaagaaaaagacattaaccgtctagaaatacaagccattttaaagattttgcttaaaagatgcgcttgggctgggagcggtggctcacacctgtaatcccagcactttgggaggccaaggtgggtggatcgactgaggtcaggagttcaagaccagcctgaccaacatggtgaaacctcgcctctactaaaaatacaaaaaattagcagggcatggtggcaggtgcctgtaatcccagctacttgggtggagaatcgcttgaacccgggaggcagagacggcagtgagccaagatcgcaccactgtactccagtctgggcgacagagtgagacttcatctcaaaaaaaaaaaaaaaaaaaaaaaaaagacgggcttgtttcgtcgttgtggagtcatcccagagagaggctactccctagagtcactgaccacctttcctcctccatcttttcctcttatcattctagagacagaaaacaagaatctcagctttaggtggctaacctcaccccccaagaaaagaaactaccactttgattgactacaaatccaagaaaaataaaagagaaactttaaaaagtactgagcaaaccacaggtctagcaaacataatgctagccctaggttacttattcatttacaacaaacccctagatataggaggaaaaaataaaaggtaattaaatatatacacatacaatattttaatataaatatataataaatagttaaattatgtatgtataatatgtaactaaatcaaagtaaaatttcatactttgattctattggaaattcaaaattcatttattaacttatatattaaggaatttatgtaaaaaaagatttttaaaagggcaccaatttgcttttgtgtctctacaacataggatctaatttaactttacatttgctaaatacactaattgacaaatattcatggatttaatcaatactggggctcaaattgtagccacacgtgggaatcccataaatttaaacactctgtccctattatcttgagaagaaaactaaatataaaattgaaaaaaacaggtatgtctcaatttacctgtaactttgcctaaatttcccggagtcatatacccattgctgtaaaacattctctattggacataggtgctctgagacaataaataaaatagaagtgtttttggtacttagacattggcttgacaaaatgggatcccatgaaacctcagttaagatagtgaatacggcccaatgtgagttgaaatggggcctttaaggattaaaacttattacatgaaacctagtaagtaatggggtgattatccatactgcttctccatttcatagcccaattttgacagttgtcaaatctggaaaaaacaaacaaacaaacaaaaaaacccctgggaatctgttgcctcacagagacacaaagtagacatcaaaattgtatatctcagttccagttccaaaatggtggcatagaagcaagctggctttactccttcacacagaaaaccaaaaacaaatatacagcaccaaaattattaccagatatattccagaactcaaatatgaaaatgaaacagttttcagagccacagagaagtgaaaaaaactcccgacagatgacaaaagaatcagatttccccatctgtaatgtccctccctgccccattctgcctggtaccaggtgtgtggaaaattttaccccaactcatggtttctacactgggaaatgtaagatcaatgcgggcaaccagtttctgcacaatcctgggttccctgtccctgccttaacccacaagaagcattgtgagtgcccgaagggagaaatttccctgaggacagtcaaagagtggggaggcaggactaccatctccttccctggaaactctgctgtgtaactcagccaagggagacatgaaatcagactggtgtttcagcagctccatgttgtagtaggtttgtttcacaggtatcctgggcatggacatctagccagctttcccacactgccaggatatcccctttgggacctccctcagttaggaagggcacactctgatcatttactagggccaaggtaaaccctaaaggtaacttagagatgaaaaggaggtagtgacctagcagtaaagaactctaagaaaatctatccaataaaaatcaaaacaagccagacaaagactaaaataaataatgaatccttcaatgtaaagacctggacttacatccacaagaaacagtaagcaggtaaccatgatctccccacatggacaaagtgaggaacaagtgactgatcctgatgagatggtgatgtgtgagctctctaatcaagaattcaaaactgcagttttaaggaaactcaatgatcttcaagaaaacatggaaaagcagttcagaaatttatcagagaaatttaacgaagggattgaaataatttaaagaaaacaaacaggaatcttggaattgagaaatatatttgctgaacaggaaaatttattagagtctctcaacagcagaatggatcagaggaaagaatcaacccaaataagactcccccaaggcataaaataatcgaattctcaaaagtcaagggcaaagagaagattttaaaacagaaagagaaaagaagcaaatggcataaagaagctccaattctgtggcaacagattttcagtggaaatcatacagaccaggagggagtgacatgacattctcaaaatgctgaaaaaatattgacatttgagaatactttatccagtgaagttatccttcaatataaaggagagagaaagtttcctagacaaacaaaagctgagataattcacaccatcagactagtcttcctgtaaatactaaagggtaaatactaaatacttcaatgtgaaagtaaaaaaaaaaacactaacatgcaaaacaaccacaacaacaataacaacatttgaaggtataaaatccactggtgaaattaagtacgtagacaaacccagaatactcaaatagtaattgtggaaagtaatccaatcataactctagcatgagtctcaaaatataaatctatcaaaaacaataatacattttaggaggccaaggttggcagattccttgaggtcaagagttcaagaccagcctggtcaaaatggtgaaaccccatctctaccaaaaaatacaaaaatttgcagggtatggtagcacatgcctgtcgtttcagctatttgggaggctgaggcaggagaattgcttgaacccaggaggtggaggttgcagtgagctgagattgcactactgcactccagcctgggtgacagagggagactctgtcttaaaaaaaaatagctacctgtttggagaaaggtaatataaaatatgtaaatagagacaaagtcaaaatttgcaaaggatgaaattaaagagtagagtttttttggggggttttctgtttctattattttatttgtgatctaagataagttgttaccttttcttctcttgaagatactttgttatatctatgtttttggaagtcttatggtaactgcaacgcaaaaaatctatgatagatccactgaaaataaaaaacaatgacttaaaacatactaccagagacaatcaaccacaaggaagacagtaaaaaatgaagaaaggaagaggggagttacaaaacaaccagaaaacaggcaacaaagtggcagtagtaagttcttacttaaaaatattgaacactgaatataaatggactctattctccaattaaaaggcatagagtggctgaatgctgcctatatgctgcctacaagaaaccacttcatgtaaaaagatacaaatagactgaaagtgaagggggtggaaaaagatatttcatgcaagtggaaaccaaaagagagcaggagtagctatactgatatgagataaactacaaatcaaagactataaaaagagacaaagaaagtcactatgtaatgataaagcgctcagttcagcaagaggagatgccaattataaatatctatgcatccaacacttgagctcccaagtctcccaagtatttaaagcaaacaatagtggatctaaaaggagagatagactgaatacaatattaattaggggactttaacaccctgctctcagcaatggccagatctttcagacagaaaatcaacaaggaaacttcaaagttaaactacacactagatcaaataggcctaactggcatttacgggacatttcactaactatctaactgttacagaattcacattattttcatcagcacatagaacattcttcagaacagaccacatcttaagtcccaaaaccagtcagaataaattcaaaaaagtttatatcacatcaagcatttgttctgaccacaatggaataaaactacaataaatgaataactttctggacacatacaacctaccaagatggaagcatgaaaaggcagaaaaacccaacaaaccaacatgaaactgtaacaaaaggaaaacccaggaccgaatgacttcactgctgaattctaccaaacatttaataagaactaaaaccaattctactcaaaatgctttaaaaaattgaagaggatggaacactttcaaactcattctacaaggtcagcattatcctgataccaaaaccagacaaggacaggacaaaaacaaacaaacaaacaaacaaacaaacaaacaaaaaaacactacaggattgcttgaggccaggagtttgagatcagcctgggcaacatagtcagaaccaatctcttaaaaaaaaaaaaaaagaaaaaaattagccaggcatggtggcatgtgcctttagtcctagctactcgggaggctgaggtgagaggaccaattgagcccaggaggttgaggccgcagtgagccatgtttgtgtcactgtactccagcctggggaacagagcaagatgctctctcaaaaacaaaaagcaagctgggtgtggtggctcctgcctgtaatcacagcactttggaaggctgaggtgggagaactgcttaagcccaggagttcaagaccagtctggacaacatagggggactccatctctcaaaaacaaccaaccaaaacaaagccaaaaaagaacataggccaacatcactaacaaacatagatgtaaaagtcctcaataaaatattaacaaaccatgtttagaaacacatcaaaagagatcattcactatgattaagtgagattcatcccagggatgccagtatggctcaacatatgcaaatcaataaatgtgatccatcacattaaagagaaccaagaacaaaaaccatataatcactccagcaagtgcagaaaaggcatttaataaaagaatgggttgagggagtggagcccatagtcagagcagcagtggtctgggattttggaagtagaaagaagggcagcaccactggccaggaccaccagggaacacccccataggccctgggtgttgtgctccagggagggttccctctggagttattaatcttggtgtccactttgcccagctgcccctcacagggtcagggaggatgaagggaaagcttccttctaatgaaagttcagggactcacagttcctagagcctgtagggagaggaagatcttcgaggaagagcacctgggcattggggcgtttgagaggaagatctatgccaggtccaagtggacaacctgtggactctctctccagggacatacgggtatctgggaatctcctgtagcttaaagaggtaaagacctctccctttagcctgaggactggaggatgctggttcaggtgaatgagtcctgcaggggctggtacaggcctggagggtggtggtgtccagggccttgggttcacccttagcatgattcaggccgggcggtgtttcacatgagcaagagggcctgggttcattgcttcaggacaatggtgaaatctcatggtggaagaaatcttgtccttgccagtgcccagctttcatttggtcttggcccagagtgtcctccctagagaagactcttgtcccttcttcacactgcccttcagggatatgccagccttatgggataagatggggtggagactgtagatgtgggtgggaatctctccacagagtgctccttctctcagcggttgcaccttgtctcagggcttcagcttgaaatctgggatctccaagcccttccctccccagtcctggccaggaccacatgggcagatgcattgtgtgaagtgcatttcatttggggtgtcctctctgcatggcaccctcccgttgattctctttgcgcatgtcagagtgcaggcaccatccacacctcctgctggaggagggacggagctgttgactcctgagagctgatcatgtgttcccaccctcacacacaatcatggtccatcctctgagggacatgtgttgccaccactgtggagatggtgcaactgacagtaacaaacagtaaaatctggtactgaatgggaccttaagccaacaatgacaatgtcattccaaggtgtttcatttttattgattcaatgcaagtcacctgatttcattgactattcacaatagctcgataaagtaaatgcatcatcaccaccactttaaagaggaaaaaggtgcttgggcagtttgtgactactgtggtggctgctgcattgctctctggtaaagccaagtaggtggtgggtgcggcctctgggctgggatgatccaccctcctggtggtggcaggggagccaagctggagccatggcctgtgcagtggtagcagctgaactgaccgctgctgcaggatttgcaagctgttacattttgcgaagccatgaagcacataaaacctcaagtagaacaagtgtttcaaagtctaccaaaatctgccttcagagattattactacagaggtggatatgaacccaaaatgacaaaacgggaagcagcattaatactagataatgaatgaacactagtaatagtagggtaagccctactgccaataaagaaaaaaataagagatgctcattaacatgttatgctcttaaatcacgcagacaaaagagggtctccttatatagtagccacaatcaatgaagctaaagatttactgcaagatcaagctaaaaacagtaggtgtataatgaatttttaacttcatattagtttatgtatatgaatatcaagtttttataataaaatgcctccaaacaaagaatatttgatttagggtttaataacttctaagaggggactcagatgtttcctgtttcacagtcagtctgagagggtcatttttcctggagctgacctgggtggaggcctcacactgatactccccagcatcctctctcctgatggggtttatgctgagcatacagtggccctgggacagctccattctctccatgagtcacagacgctggtcatggaagatccactggataaggttccagagtcatctgtggggcaggtcaggatcacaacatccttttcttctgtgactctggtgttgctgactcagatggggtcggagccactgaccctgtggacaatcagtggaggtgctcaactgaaagtgggctgagggcacgtcttctcctccatccctgggtccttaaggtaactgtggaccccagaccaactgacacaggagctagaaagaaattatttaggaagttagtgagggtaagagcgtccttggcaaggtttcccctttaacaaaaagcagcccaagataattccttttctaacaaagagcagcctgaaaaattgagctacagatgtagatgagcaagatggaagcttgcacaggtgaattccagtaggtgtgccaatagaaaagggctgcctggaagccaggtatgttcaacatggagactccatcctcccttttctccattaccacatgtacagtaaaaaaccaggcaacatggcaccggccaggtagacaatccatctgcatgacaaaagatcagagtggggcagccagcaaatggcacagctggtctaaacaatctttcaccccctgtataaatcagacactgcctcctgaagctcatctataaaaccttctgcatttcactatggaagtggcaacccattttccccaggacccctctctctgtgcagagagctcttctctttctttcccctatgaaacttccactcttaacttcactctgggtgcctgcatcctagttttccatggccatgggacaatgaacctcgagtattaccccagatgaatgatgctgtttcacaatcactggttcagctcccttcttcttagggtttcacagctcggtggggagaataccacgcctcagtggtctggggagtgaggaacaaatgaagaattaatcagattttacttagaacgctatcacctgcctcaaccatcagatccatgttgggaatgtccaggcctcctctcttagatctatacccacttcactggacctgaaatcctgtgtttcccgatgtgttggtgtcactcctatgagaggataaaggagagaactttgctttctctccccactcacaccctgcacaagacagggcccaatatgagacacacactcgctcagtagttctctcatgaaggagggagggagtgacctcgagtgattctgccatctgtagtctgtgtaccctggccagtggctgtatcttcatatgcctcagtttcccctcagtaaaataggacacacaatgagaactaaaaataaaattctaattccccagtgaactgaaaggatggcctcttggccaagcggatcccagagttcctgatcatgacaggatgggaggttacacctcattacagcccctccctttggaagtttagaggtgacaactgactagcattaacgctaaaatcgagatcatgagactgacagaacagactctctgtggccataagataccaaattataaactcaacctaaggtcatgcaggcaagggctaagccacactttcctacatttaaagaataagctatgttctaacacagaattttctttctctctagcggctaaagtaacactagccttcgagataagcaatattgaaatgatcgcggctcatccaccaacactggctaactgacccctgttccaacagccacaactacacttcaattggacaggagactgatttcagtaactttctcctaataagagaccactgagcatggcctggttctgctggtatacagacacggtgcactgagtaccataatgcttgtttcatcttttgatgtataagacctaatttaatacatttaaatctgaattctccaccccaaagtgaacatggggtgcatgtagcatgcatgtttgttgatcacgcatgtgcgtgtacttcctttgtgagtatccatagctccacctataacctgttgaatatgtatacctggccaactcattcagcataaatctatcttccacattcccctcccttgaagtgcctgctattggtctctgctggaggctgcatcttctaccctggggaatggccagcctgcaggctgtaaccctgtgtaagaaataacctggttgggtgcagtggctcacacctgtaatcccagtggtttgggaggttgaagtggtagaatagtttgagctcaggagccagagactagcctgggcagcatagcaagatcctgtctcttaaaaaaattttagggaggagagtgaggatcagaaaaaatacctattggctattatgcttagtacttggatcatgaaataatctgtataccaaacccctgattacatatataacaaacctgcatgcgtatctttgaacctaagataaaagtttgttttaaaaactatctgggtgcagtggtgcatgcctatagttccagctactcgagactgaggtgtgaggagtgcttgagctcgggggattgaggctgcagtgaattatggtcccacctgtgagtagccacttcactcaaacctgggagacagagcaagaaccggtctctaaaaaaaaataaaaatagaaaaataaaatgaaaaatatatgaaataaagtctcctttccaaacgtacagatctccgatttttctgccaacaatgataaatggtcagtggcttgccatgttgtctgtgaattacttttaaaatattcacgatcacctgacctaaaggttggtaccaaggaaccgcctgaatacaccgtctctgattatttgcctccaacagagtgttccctgggcctgatctctggtggacaatgagctgctgggaacatcctctcttctctattcctcccctggggatgctgaccttcccttggagtctcctaagttccccagggcagtcggctaatgtcctagggagcttacctgtcttctccataccaagtctcatgtgaaggacgaggctttgcccttgcccagatgaggctctgggggctgagccctggctggctaccagctgcaagagccatggcccttggacagctggtaaatccttgttcccagtcagccctgcccaagatgcctcaacccagccccggcacaggcttcccagggtcacatggagtcaggatcctgggacaggggactggacaggggtttccagggctgagtttctgaacaggggcttcccaggggtcccctcactccaggatctgacatggtcctacaaggaacgtccatggggaggggacccaggagggggaactgacactgacctccccttactgagcctccccccaaccccatcagactgtccttcctctgtagcaagtgcctgcagggtctggatgcaggaaagaaattctgatctgtggaagtttgtctcccctgtgtgtgtcttgcactaaatgtccaaacccccaaatgggatgtaatgtagagggggacacaggcacagcccaggcctgaaaatcctgtgtgtgtgaagcagaactgacccccaacacccagagctcatgagacatcactgtgtacgtgaaactggccagttacttcttcattcacaagatctgtttttatgacttgtagggtgtaggatcctgtgtcattgttggtgacattctgtatcagcagacatgtattggggtatattgtctctcagcctctgtggcaggtcctggggtaattacttgagttcctagtacatatcctgtaattcccctttgtaccagttgtagccaagcctaaggcagattgtgggtgagtggaagaatctccttgccttctgcagcttcaacagtgacttgggcagtggtaggcaagttccagaaagttaaaagtgaggctaggagtggggagagagcatcagttaatactgggccctatgcattgaggtggaaagatggggccctaggtcctggacaggtctcttcatccctcagccttggagtgtgtgtgtgtgtgtgtgtgtgtgtgtgtgtgtgtgtgtgcgcgcgcgcgcgtgcgtgcgtgtcctactgggccaaggtcagcagcatgacctcccttccttcagtgcctctgaccttggcatttccctgtttggagtccttttccccaggggtctgcctggctccctccctactgccttcaggtcctgctcacattagggcatccttgggagaccccttccctgacacctctagagaccctgggtcttccctttctgacctttcgctgctgtgttccctccagggctcttgtcaatacttgacctcacattctagatacccttgcatgtctgtcttcctccctatgagagcatgagctctgtgagaacagggacttgtgtgatcttggttgcaccccagtgcctgggacaggctgcggactcctgtggatgagctcatgagtgttcccagggcccttcacaacgtgggatttattttccaatggctgaggttgttggctaagagctctgttggagttcaatcaggctggtgggaaaaatattagagatagttatagagatagacacaaatcttcttggaagaccaaaaagtttgcataactttggtaatagatctgactgaaggtggtccctttacctttagttaaacaaattaaagtagtaacaaaggaaggcagagtagtttgtctagccagcttgtttactcatgtgatcttaagactaaccattgatgtgccacaggtgcttaattgctttctacttgggaagtccacaatgtcaattaccctctaacggtgttgactcaagcctttgttaattaatcttactgaataaatatgagtctcactagctgatcaaggccatggtcacaactgtttataggactcagcagggagtctgtaagcggccctgacagactcagctggactggcaaagcaaaatatgtgtgtgtcagtgtacactattcacccgtcccccacagctggtgcccctatatgaggagtgctgccacagagctctgtttagtgtcccttgttttttttcttgagtattaccccaacttaaattgtgattattgtcatctgttttcaacattaactgctcagtgatgattcacttggaaaacattaacaatcgagattgtttcttcactaacaacctcagattatttagattttcctgttgtaatcccttcttcctgtttagtgtccaacagaagccctctgtccctctcaggtccccgttctctccaagaaaccccagccagtctctgtgctccctcctcccatccactcccagggagccctcccctcacctgtgagcagaagcgcctgccagggatgtgcactctgtgaggaggggctgagggaggccccatgggctctgctgtctgctttgtcctcctctgtggagaggagcttgggcttcagaaaataaggaggccagaaagtaaggaacaggctgagaaataatggggatgtgtcgaaaggtcacagatgccaacatctttgtcctatgcaatattatccataaaattacaggtttgagatatgcttaaattttcttctaacatgcattaaaataaacatataacttttaatagttatattaaattgtatttaatataaattaaatgctcttgtcagagctactgtgactgtcagctctgctgtccttcctctctctgtgctaagcctcctcccagggcagaagcacttcccagggccaggggtgggggcggggaaaggtaagtggcaatgaggatctgcacaggtagcctttccgcctcctcccctctcagtcctgcctccttgtcttcttttcctctttttctccaatctacatttcagttccttagaccacgctgtgagaagcaaggcttattgggacccccatcccttaacaggatgacctgtgctccccataagtgacctctgctgtgtctagggattggctctgtcagcacctcacagagagtccctggggcccccaaactcagtgttattttctctatgacacagaaacccctctgggtatgcaaggttttcctcatgttttctaatgtctgggaaggttggatttactcccagcagggaggtcacagagatgtccagggagtggggtcctagaaatggacaaatctagagctaaagcccaggtctacgattttcagttgtttttttctgcagtgctatgtgaccctaatttcctaggagtaactaaaatgcaaacctcagacatttgtagacattttatgatttttctctacagcttgtaccactgttattattatttgctttatgctttttcctaaataaatttactttacaaaacatccttgtcctagtagggtgcaggggctcacgtctgtgatctcagctgcttgagaggttgaggtgggtggattgcttgaggacgggaatttgagacaaaacatctttgtcctatgcaatattatccataaaattacaggtttgagatatgcttaaattttcttctaacatgtattaaaataaacatataacttttaatcatcatattaaattgtatttaatataaatttatatacaatacatttttatataataaattatatatataaatgtatatataatagtttttcttttttgagatggagtctggctctgtctcccaggctggagtgcagtggcacgatctcagctcactgcagcctccgccttctgggttcaaacgattctcctacctcagcctcccgagtagctgggattacaggcgcctgccgccacgcccagctaatttttgtacttttttagtagagatggggtttcgccatgttggccaggctggtctcaaacacctgacttcaggtgatatgccgcctcggcctcccaaagtgctgggattacaggcatgagccaccatgcctggcctatatattttatataattatataaagttttctataataaattttatataataatatataaaatggatatttatttaagataaagttattagttttatatatttacatatatttaggaataaatgtgttactgtgggagcccagtgcccaggcaggtagtcagtacatgatggttgtcattagggttaatactttggaattctggattttttcccaagagagtgtctacgctggaatattgggcttgtggctttctgctgatgtgcatgtgtgaagaagctacttccacttattaggacttgtgtatctgtctcgcagtttcactacctattttctcgtgatgttggtcaagtcgcctaacttttctgtgcctcatttacctaatttgtagaatatgggtaacagtacacaagtgtgagtgtgtatttcccaggactgaccactagagggcgtgaaggcaccggcacttactattacagcaatgggtgtagtagtgctcatggtcgtaaacatcattctcccatgaaaggaaccagggcttcctgggagaaataactgattccagggctggggccggaaagcacaagcggagcctggagcatctcgtgaggccagaaagtaaggagccggctgaaaaataatggagatctgtcgaaaggtcacagatgccaaccagaaggagctttgaatgaccaattttgagacaaaatgagcactataagaaataatgatagtaataaattccaacccataaatacccatgagttcctactaatataaataaataattgaatacataaatatataaggatgaagaaacagctttttcttacagcagaattccaattaatgaatgtagaaggaatgatcaaatagaaaatcactatttggctaacagcacagtcaattgtttgtaggcaagaattatcaatggactttaaatatgaatgggtaaaagtatgatgatgctacaactagtgagtaccaagggggaaaaaaaagtacgttgagaagaaacaggctacttccatattcccaaagtatcacttcaggagctacttattgattataatgggacaaatagtaacttacagtagagaaacctggcaacagagtctctccgaggtacaaaggctctcttcaggaaggaggtaaggggaaggaagaagaaaacactgtcctgcctcaattatttgctttccccattctcaagtgtacttcatagacattcaaagatatgtgttgatagtgtccacgatccacatggctctattatagtcatttattcacacatacattcagtgaggctttgagtgcctaatgtgtgcctgatatttgctagatggtggatgctgagaagatcaggtgtgctgctgtctctagggtgactgaatccacctgccccactttacagatgtggaaattaaagtgaaaaggatttataggattagttcactgtcacaaggtcactagccttaaagttacaggagtaaagcaagtttcctgacttgctagattttctgctgcaggtgctgacaatggtgagctccaataggagagaggacactcagagtgaagtgggagccctgaacaccctggattagccaagaggacatgccgggtccagctgtgaccgcacaaaggaccattggggatatttgtattctctttttcacttagagcttgaaatgaggaaaactaagtgcagaaaaccaagagtggaagatttttcacaaagcactggtaacatgcatcagaaaaccctgtgctgatgtctgtcacggtgtttctcactgaacggtaatagtctggctttgagtgtgttccctctacagcctggagttctgcgaggcagggaccaggtgtgattcatctttgtctctccagtgacagtacacagcaggctctgataaatatttcttacaaaataaaatggaataaaaagtagacatctgcacaggtgtgggatgactgagcagcagcagaagcaggaaaagtcagcgtccccagatcagctgatgtggtgttcggattctagataggggtgaggtgccaggatggggatgggggtcctgtggctctgctgccctgggggacacccctaggtttcacagtgcctgctgtggttgctgcactttgcttccccatgggaaagtgatcagagggtgtggggcttcaggtgaccccatgtgggaaatggccaagggaaggtggggtgggcggcacatggttttttttaaccaatatttgaaggtaggttgtatgaaaaggtgttaggcttatttcagcttatggggagtaggacagggattggtgagtgtgtatcaggtatattttggctcaggatggaaaagaactgtcacagtaacataaggtcttttgggaaattacatgtttactggcagagttcaggccagggctgggtgtctgaaaatacctgtcagggtcacttttatggttacaagggcagagcttggcttggaaccaggtttcttactaataccacatattaagtattataaaaactgtcctttgcaataggacattgctctatgatgcaggttgaggtccctctgtttaagtaattgtgggtggctgtgattctctcatctagtctgcgacttggacttcacctccatctgcagtccctctcctttgctgttgacactggtcagagttaagcgcatttactgacgatggtcacagggtggcagcactgcctctctggtattttctaaaacctcttcctggaactgagccagtctaagaggatgtcatgactaagaaaagggcactaatgaggtgaacagataattttttttttcttgtttctcctgtgaagtaacagagtggaggtgagcatggaataattgccttttagaaatggaagacaatggagagaagtgtttcgcaaaccttaatgtgttcacagatcccacacagatctttttattcaatacagattctgatttttctggtgaggcctgagattgtgcatgtctaaggagcttttggatgatgccattgctgctggttggcggaccacactttgagtagcaaggctcgaagatcatttagaggttaattctcactgcatctaatttatggatgaaaacaaaccaaggtccagagagagcatatacagcttgcctaacaaagccattccctaagtgcctgacttcttgcatttaaacccagggcttcagcctttgtccagttctcactccacacatcacacggtttgttcactgttgtgaacgacagttgtggcagcatctctttagtttaggaatccagagccccaatttcactaccctctttggtcttggctcatgctgtgacttcgaatagttttgcccttacttaaaatcttcagtggctcttttgtaatcacaagatcaagttcgaatatctctgtctagtgttcatggctttataacatatggtatctctttagtaaccttacctaacttccctgttttaaaattgtctcttgctgccatagccctccttgctccttcctgctccctaacaaactgtgttcacttctctctcagtggtagtgatgatggcatggcctctgatgttagactcatgtaacttctaatcccagatccaccaccaacattggcaagttgattcatctttctgaggataagcatcctcctctgaaataaacttagatggcggttgagaggggtaaataaaataacacacaaacccactctcatccctgagaccctcttcaaaactagcatataaaaatagctatttgaagaggttcagtgaaattcaaggtaacacagagaaggaattcagaatcctatcagataaatttaatagactgaaataatttttaaaaatcaggcagaaattctgtagctgaaaaattcaattgacaaaccgaagaatgcactaaatctttcaacagcagaattgatcaagcagaagaaagaatttgtgagcttgaagagataatatatgaaaactcagagtcagagagacaaaagaaaaaagaattaaaagaataatgcatgcctacaaggtttgattattaagctactcaaagagatacaagagaagggtgaaaaccaacataaagaaatgtaaaaaacaatcagaatataaatgaaaaattttctaaaatgctagctagtttttttttgagacaggctcttactctcatcacccatgctggagtgaagtggcacagtcatggctcactgcaggctcaacttcctgggctcagatgattctcccacattagccttccaagtagctaggactaaaggcgtgtgccaccaggccaggctaattttttgtatttttagtagagatggggttttgccatcttacccagggctggtcttgaactcctgggctcaagtgatccaggagattcactgccaaaaaggatataaccaagtcatatagtcataggttatctaaagtcaatgtgaaggcaagaattctaagagcagtgagacaaaagcatcaattaacttataaaggaaaacctatcagtctaacaccagatttctcatcagaaaccttacaaaccagaaggtattggggtcctaatcttttggcttcttaaacagaatagctctcagccaagaatcttgtgtagagtgaaattatatttcaaaatgaaagagagaaatacagtctttttcaggcaagcaaatgcttcaggatttgtcacggctagaccatcctacatggaatgttaaagggacttctaaatcacaaaacaaaagatttaaatagaacagaatagaacctcttgaaaccaaaaaattcaaatggcctataaaacaataacacaataagaaaacaaagtagataacgatcaacatgatgactggaacaaatattaacattgaatgtaaatgacctaacactccacttaaaagacacagattggcaagataaataaaaaatcacaaaccaaatatcagctgtcttcaagagactcacttaacatgtaaggattcttatagactcaaggtaaagagatgataaaagatattccatgcaaatggaaaccataagtgagaaggaatagctatccttatatcatataaaacagactttaagcaacaacagtaagaaaaagacaaataaggcaactatataatgataaaaggatcaatcaaacaagaagatattacaatcctaaatatatatgcacctaactttggagctcccacattcataaaacggttatgatgagacctaagaaaaaagatcaacacaaaacagtgagggtgtcctgggttttctttttattggacagcagtgtactagcctatcactttcccagtcaggggatttttggtctccccattcccctaccatgggttcatgccaaagtccatattttttattagtgtttggaattggattttttttttttgaggtggagtctcgctctgttgcctaggctggagtgtagtggcacgatctcggctcactaacctctgcctcctgggttcaagcaattcttctgcctcagcctcctgagtacctgggactacaggtgcatgccaccacacccagctaatttttgtatttttagtagaaacgagatttcaccatattgtccaggcttgtatagaactcctgacctcatgtgacagggaaacaggcactcagtgaacttcatgcgattgaggagttaatgataatgagagaagggctgtgaggggacagcactggggacaccagagcctgtgacgggctgagttgctgtgccttgggagatgcccttttgactgagccctgggaaggagggggtgtgggggcaggagctgcctgcagagggagtggcctcaggtgggcggccacctggctgcagggaagaggtgacagagttcgtgtgcagagcttggagggtgaggaggaggtgggttgaggtgaccttggtgagggtgaaccatggggggctgtgggccctgctgagggaggccagccagccctggacctacagggtggtttggtcttttttgtcccattcccagcatccactgagtggtgaaactctgcaggccagggaccatcccactggccagaaggagcgcacagtaggtgcccactcagtgcatgttgggctggacagaacctcactctgccccctgcccccagctttgggagctgcagcaaggtccctccccctagggatctccatgcctctgtctctgaggggtgagatggggagacttcaaagggccatctcagagtgtgggggatagagacgcagaagtgtgggggatagagggaggcctgggctctagacccaaaggaccttacacacctcctgagtcttttcaaatggtttcttctgttactttaaaaatgatgtaagtcatcatatttattgtaaatcccaggaatctaatcatgcgtaaaataaggtgtcttatccttgaccccaccccttccccaattaaatttccaggatgttaccactgtttgcagttggtgtgaatctctctttaataatactctgtttatctcacttgtcgttttacgccaaaatacccattgaattatattattgctgaagaccattcttttttttttttttttttttgagatggattcttgctctgttgcccaggctggagtgcaatggtgtgatctcggctcactgcaacctctgcctcctgggttcaagtgattctcctgcctcagcctcctgagtttctgggattacaggtgcacaccaccacacctggctaatttttgtatttttagtaaagacagggtttcaccatgttggtcaggctggtctcgaactcctgacctcatgatccaccctccttggcctcccaaaatgctgggattacaggcatgagccaccacacctgcccagaccattctgttctactgaatcatgtgtggtgggcacctcttatatcaatacatatggattttatcttgtgtttgttattggctcccctttttctcattgcatggctacactcaatgctttgtccacacccctgttcctgggttggaatcttgtgacagaaaatgaagtaacaaaggctaaagctttctaaagtggagtcaggagattgcaagacaattgcactttcaccagcaagagctcaaaccacagaatgttccaatagatttggataaacagctgaagtcagtattcaccagccttcaacatctcaactaggagaaccctaaaattaactaagcacatagaatggaatggacttgtgatttaggattccttctcagccaatgagctgcttctgaaaacaactttttgtggaaattacctgtaaagaaaaccctctcctgtgcttgtcttacagaacactagtcagggctgccctgattcagtggacccgaattgctattatttgtttcctaaacatatggtattttctgtgaccttcatctcaatcttttttttaagttactgggctgtttcccagttttcataatgacgagacattctgcagtgtttcatacacatgtcttttccccatgtggagtattgatccaggagctcattcagtcaacgcatgtttatgaagcatcctgtgccaggctgtgggctggtcactgtcttcagcagagagaggacaggcacagtcttgccttcacagagctcacagctcagggaggctcttagaagtgggatactggtcggagcatgtgcacattaaacatgatgaggtcaaggttgctatagggactaaaccacagtcccaccaagatcgcattgagttcctgtggtagaccagaggtcagggcccctaagatgtcctgagcagctccctctgctcagaagttttggttccacaggtgacacacctgagcacaggtgacccctgcagaacctgtgattaccacccaaagccaagagtgagtggtgggtgttctaggaggaaccgtcacctccatgggcagggttggggaagactgaggggagcaggtggctgatgactttggccagaaggtagggggatgggcaggtgtgcgctcatagggaagggaagagaagggagggcattgcaggcaacaacacaaaggttggaacctgccttcatggactgagaaaagcagggagtccacccaggctgcagctggggagggaagacatggggagcagtgggtctaggggagaagcagactgcgattgaccttggggactgggcagtgagcagaggtgtgttatgtgtgtctgtccccatcatagatatgaggaggggtgaggccgcgggtggcacctgggtcggtgggatttcatagtgcctgctgttccctagagcctctctgtatagagggtcagaatagatctgaggctgtggtctgggggaaggggctggtggtgcttaccatctctaggggtgggaggagagggatgaggatgcccctgagcagtgaagcctcaaggtgtgtggagccacagttgtctctcattagacatgtgttttgcgtgaggatgccagggcctggtggttattactgttgtcaagtttgcatgacaaggacccaggtatccagggatccagagcacagggcccctggtgaggggatgaggctcagatggggctgaccaggttcatgtggtcagagtgggagggactgatggagagacagagcctcaacccctcctgtcaggagctgtggctatgtccaggagagatgacaaggatgacccaggacattgagtgagtcattgagacattgaaggtgaggacagggcagagaggaccctggtgactgctgaaatgtaggatgtgaggagggctctgacccatgcaagttacaggacctccccacccccgagcccacagatgacccttaaattgggcatcctgagtgctgtgtgtgcccagcagggacactggataggctggacctgagtctctgtaagggcagcgctggtctgtaggaccagagtcttctctgtgggtgtgacgtgggcaggaattagcaagatgggggtgacaaggcttggcttggaggatctggtacagaagcccatgggcttggtcagctcagcttctcaggggctcagctggggctggaggagcaggatgctgtgctcagggcatgctccaggcagcgtgatgtgtgtggttccagggtcaggcacgggggtcaaaaattaaccatgaaaagttcccaccttctgtaggcagagaaaatggcctgattgtcagggtcagggagacttaccatgtggccaaagcaggctctcagcctcccagagaccacaccctgggtgcagcactcagctctgcagggtatggcaatagatgtgccaagaaccccaacatccagatgcatgcaaaaattttgcgatatataaaatagagcagatcaagtttccctgcaataacgttgttcctggttgtgtctttttcttgtaaactagacatggacatctttccagcagtctgttctcatctgccaccttcctgctgcagcacctcagaatgaacattcctgagacactgtccgtggtgctgacgaccaagagctatggaacagagtgtgatgtagaatcttctagttacctctgctctcctttcacttttaacaacagagcatcattaacaatgagaaggtggagaggtgttcaggatcttgaagtgacttctgtcttgctctcccataaccctgaagctgctgtagacattattgcagaaactgacaccacagtcaggatggccttgtccaggagcccatgtgcagtttgtagtgagcaaggatgagaaaatggtcttgaaaggggtgatggacagaacaggggcttttcaaaaatgtcacatcatcacccccagcatccgtgaatctgtcacatggtaagagaccttacagattaaatgaaggattatgagtttggaagattattgtagtttatccagatgggtccaacataatcacagaatcccttccttacaaatgagagagggaggtgggagagtcagagaaggaggaggagatgtggggatagatgcagaagacagagcggtgtcaagatgctgcactgctggctttgaagatggagaaagaggacacagccaaggatgcaggaggcctctaggaggtggaaaaggagaggaaacgcactctgccctggagcctccagaaagaacgcagccatgtgggcaccttggttcaagtttctgtgtcacttagcttgtgggaatttgtcacagcctcaacaggaacctacagaggagtcaccttgtgtgcaggtgggatccagggtcatttacagctaaatcctgatgtaaatattgcaggttgcttttcctacttcctatctcatggccaacaaccctggacaatggcagaacacccttggaaaccacggctctgtgctttagtggagggaccagcttgtttgtgggaaggtagcacctggtccaagtgaacctacatgagatcgttactctccccagggccctcagggaagggctgagaacagctggcccaggtgtgtggaggagctgcaggtgaggcagggctggaggggcctgtgggtccaggtagaggggcagacaggttgtcccatcgccatgggagcctgcacgagctttaggttggggaaccctgctcctctgacctggacgctcctgtgtggagaggaggcttgctcagtgagatccacgccagggggtaaattgggaactgatgggaaatgaggggctagagtcctgggtagtgcctgggaggaccttgctcaaggactgaattcttggtctgttcccaccttggttactctgacaacccctctctgtgtcccacggggataaagatctcctgagcagtggccattgggacagaggagaacctggtggccagagctaagcatccaggatcctggatttggggacaggcaagctcattgctgggggacagtgatagatacggcctccagggcctgggtgaagagagcaggagggctcaggacactggaggctgtgtggaggtcacacccacgatctgtaccacccatggatgctcctgcattgctcacctttgtgtggacatcagatggccccaacttttgcactcctgagacatctcatgcattcacagagggacccaggctggggctgtgcatggccttggtctctagggtagtgtgaggacagctgagcactcagctggctgggcaggactcctgcgaatcctgccctttcctgtgtagggtccaccccagcctgactcctaaccccctactcctgtctttccagggaagagagactggggttgagataaggtggagatatttttcctgtgtgacccaggagagaatggacatggagtttcaggtgagtttctgctaagttcccatgagcagaaaaagagccaatgagaggaagtttcccctttattcagatcctttccaggtgaccccgggtgggccataggcccattcactttccctgcaagcccccgcttcctgtggtgatgggaagccttcgccttggcccacccagagcccggggcagtctgttgaggtctctatatattcagcagggacccccatcccttcctgtccccaggcctgtgtctcctcaggactcagagctggttctctggctcaggctccatgtccttccccatccccagggctgggggcttcagggacgctccatcaacccacaggagcagctcccagaggaacctaagaagccacatctgctttgtggtcgatccagcagtaaatgtttgtgtcagagtgtagcaattccagtaaaaacagagaagaggtcttgacccctgaggccttctcagaacagggtctggcatctctctctgggcccacccagggctactctgggactgaacctggctgtgctcagggggttcctgctcccaggcccctccctcctctgctcaccacctcctgttattttcactgcagtttcctgaacttcagctcagccagatgccagtggggacagatcctgggtctccctggggcccaagggaccagaatatctgtggcccccactcacctcatagatgagagcagctgccctggtgctgggtaggggaatctgggcaggggagagaggggtgtcaggggacagggaaggattcctgctgtgtaggaattccagggctctcctcaggtgatggagggtcccagggtggggttagcacagggagtggatgatcctggccctgaacagaggcccagctcatggccagggcaggtctaaccttatccaagtcattctgggtagggtgggtttgtgctggggattgacagtccccctgccctgagcctgcacagctggggccccagtggaaatgggattgggaacggacagtcttacctaggagatggagctgtcagagggtccatggcctggggacagagacaaaagtgagcacgagagtgttaggatagctgggcccctcctgcaagagtgtgtgggggtcctcagttcttagagaattggggagagggagcctttctcaggttattttaggggtcaagtaagcaagtgaggttgaggaagtgacccatgacccagagcccggaggttagggctgacccggccagttggggtttcctgtgtgatgttttatgggatcctctttgcagccccagggatagggtcagaggcccctgggtgtaactggcaggagtggacaacttggggctggcttagtagttcccagccacacccagactgaagggacactcaccgggggtggaggctgggggctgctgctccctgaagtcactctgatcgctggccctaggaaaggtcagggttatttgtgaaggtgcaaggttaaaagtcacaaattggagttaaaataggggaccaggaaaggagcctatttccaagaggggtatggagacctcctttctttatggagttctgtggtaggaggggcccaggtgaggggagttgaggaaaggccttacaaagccacatctgtcctggccagaggggaaggactctcaggcagatgctgggccaggagaacattgatccagtgacacaggaaagggactgaggacccagggaaggaatcagaccaccaggggttgcctgagaggaagggtcaaggcaccagggggaaagcagggccaggcacatgtgcaggacactgaggggactgcatgcatcttggattctcctggaactcagtgtccctgctgtgaccagacactccactcagggctggagatgctgaaatgggacaatgatcttgtcttctgtctctgccctttggcaagagacataaacgacattccaggatatgccatattggggccccggttctcccttctcacagctcagtgtctgcagttaccatgtcagtcaaaggggtgctgaccccacccagcccgtccaggctgttccagtctccactatgtgataatgcccaggatcccccctcagatgccctctcactgggtggatggattcagtgaacagggggaggtaccaggtattgagcaccgctcccccctgctccaggcagctgtggctttgctgtgctaggaaactaggaccatgctcaggggcatggccttaattggactgaattcactgaggacaaagctgttgaggaagcagcccagggtcagcagctggtgaggaaggtgccatggaatgagagggaaggatccctggggagtcgggaggctggggagagcctggcactgaatacaagacagggtctccttccttctcgcctggggtcagcgtgaaggatgggagcagaatggggaaaagctgtggtacctgccagtttttcggaggagcaggaaacacacaagtgcagccaccagaagactcccaaccaggaccccgatcaggatgcctagagtgttgtcatctgctgaaagaagaaggcaaaggggatgaggtccaaatctgttccagggggaaccatgaggggccttgcagggcaggggcatggtcagggaggaaggaaatgccatggagcctgagtgtggtctgttgtgctgtcctcatagctggctcccttgctctccgtggttgcaccattttctgtgtcttaggcttgaattactgggatgcatcaactcctacattctcccacaggaagcctgcacctcatcctgctcctgtgttttttagtccctccttcctctcacatcactcctcttccccctgtttctttttttccatcccatggcagtcgtaaagggcaggcccttgctgccaactcaatgctgatgagcagggatgatgttcattgactgttttcaggggccttccacatggaaggcacagtgggaatcaatctacctgcagcttttctcaccctcccattgccttgagggagaagggtatgtgatattgtgaaatacgtatttggtgttcatcaccattgatatggttaggctctgtatccccacccaaatctcaccttgaattgtaataatccccatgtgttatgggagggaccttgtgggaggtaattgaatcatgagggtgggttttttccatcctgttcttgtgatagtgaataagtctcaggagatcagatggtttcataaagggaagcttccctacacatgtcctcttgcctgctgccatgtaagacatgcctttcaccttccatcatgattgtgagacctctccagccatgtggaattgtgaatcaattaaacctctttcttcatacattaccaagtctcaggtatgtcttcattagcagtgtgagaatggactaatacagtaaattggtaccagctagtggagtgctgctataaagatacctgaaaatgtggaagtgactttggaactgggtaacaggcagaggttggaacagtttggagggctcagaagaagacacaggaaaaaagtttgaaacttcctagagacttgttgaatggttttgattaaaacgctgatagtgatatggacaataaagtccaagctgaggtggtctcagacagagatgaggaacttcttgggaactggaacaaaggtgactcttgttatactctagaaaagagattggtggtattttgcccctgccctagagatctgcagaactttgaacttgagggaaatgatttagggcaactggtggaaaaaaaattctaagcagcaaagtgttcaagatgtgacttgggtactgttaaaaacactcagttttatgtatttacaaaggtatggtttggaattggaacttatgtttaaaagggaagcagagcataaaagtttggaaaatttgcagcctgatgatgcaatagaaaagaaaaatccattttctgaggagaaattcaagccagctgcagaaatgtgcataaacaatgaagagcaaaatgttaatccccaagacaatggcaaaaatgtctccagggcatgtcagagaccttcctggaagccccttccatcacaggactggaggcctaggaggaaaaaatgtttcctgggccaggcccagggctcccctgctgtgtgcggcctagagacttggtgccctgcatcccagccactccagccatggctaaagagggccaaggtacagctggggccatggcttcagagggtgcaagccccaaaccttggcagcttccatgtggtgttgagcctgcaggtgcacagaagtcaaggattgaggtttgggaaccttcgcctagatttcagaggatgtatgaaaatgcttggatgtccaggtgaaagtttgctgcagaagcagagccctcatggagaacctctgctagggaagtgttgaagggaaatgtggggttggaaccccgacacagagtccctactggggcactgcctaatggagctgtgagaagaagaccacaatcctccagaccccagaatggtagatccactaacagcttgcaccatgcacctagaaaagctgcagacactcaacgccagcctatgaaagcagccaggagtggggctgtaccctgcaaagccacaggggtggagcccaaggctatgggagttcagctcttgcatcagtgtgacctggatgtgagacatggatacaaaggagatcatttcagagcattaagatttggctgccctgctggattttgggcttgcatggggcctgtagcccctttgttttggccagtttctcccatttggaatgggtgtatttacccagtgcctgtacacccattatatctaggaagtaactaagcttgcttttgattttacaggcttataggtggaagggacttgccttgtctcagatgaaactttggacttggacttttgggttaatgctggaatgagttaagactttggggaactgttggaaggcatgattagttttgaaatgtgaggacatgagatttgggaggggtcgggtggaatgacatggtttggctcttcttcacccaaatatcaccttgaattttaataatccccacgtgttgggggaaggacccagtgggaggtaactgaatcatgggggtggattcttcccatgctgttctcatgatagtgaataagtctcacaagatctgatggttttagaaaggggagttcctctacacatgccctcttgcctgccgccatgtaagacatgccttttgccttctgccatgatttcaaggcctccccagctatgtggaactgtaagtcaattaaacctcatttttaaaaaaattacccagtctcaggtatgtctttatcagcagccaagaccagctcggtcgcggagatcctaacccagcagtgctagaggaattaaagacacacatagaaatatagaggtgtgaagtgggaaatcagggttctcacaggcttcagagctgagagccccaaacagagatttacccacatatttaataacagcaaaccagtcattagcattgtttctatagatattaaattaactaaaagtatcccttatgggaaaccaagggatgggccgaattaaaggaataggttgggctagttaactgcaacaggaacacgcccttaagatgcagattgctcatgctattgtttgtggcttaagaacgcctttaagcggttttccaccctgggtgggacaggtattccttgccctcattcctgtaaacccataaccttccagcttgggcattagggccattatgaacatgttacagtgctgcagagattttgtttatgaccagttttggggccagtttatggccagattttggggggcttgctcccaacagactaatacacccattttctggtatgtgactctaaagtccttagaatcttcaaagtgatgtctttttcaagctaataattgactgatgactggcagcccctaggcaacttcagaatgaggctggtcactgacccaggtaggattagagggttgggactttcagcctcacccctaatccctggggagggacctggagtttgaattaatcaccaatgaccaatgaatcaattaatggccaatgattgaatcaattaatggccaatgattaaatcaatcatatctatgtcatgaaccccaaaaggactgggtttgaagagctgaacccatggaagtttctggagtgtggtgcatctggggagggcatggaagctccacaccccttcccacatgccatgctctgtgcatctcttcatctgcatcctttgtaaagtcctttattacaaaccggtaagcctaagtatgtgtttccctgagtcctgagagctgtttgagcaaactaatccaacccaaacagggagtcatggaaacctcaatgtgaagccagtcataagaagctctggaggcccagacttgtgactggtgggaaggtggtggcaattttgtgggactgagccctctgctgatatgtccaggtagatagtgtcaggatggaattggaggacacctagctgatgtacggtgcagaactgattggctgctgggtgtgtgggagaaacccccccgcatcacatttggtcacagaagtgtgtctgtgttgatgattgttattgtggagtgagagcagaggaaaaacacagtttgagtttttccaaacagggtggaatcccatctgccaatttagaatctgaaacttatagtttcagtacttcaattaagattgaagtacttcaattcagtacttcaattaagattcagtacttcaattaagattcagtacttcaattaagattacagaactggtaagtgaaagtgatacaacaaaaatgtaaccaaagtctgctcaacttaacagctaataacaacaaagttcataaaaataataccagtcgatattgatagcactgattgagccctggctctgtgcatgaccttgttaagggctttaatcgcattaatctctgaataaatatcctcacaaccaccctgagatccaggtgtttgtaacaattctacagatgaggaaactgaggcccaggaggttgagtgtcttgcccaaggtcaaatacctggtacctattgtaaccaggatgataactggatgagtctaatccctgagttcttacccacattgctccccaggctctgaaggaatctcatccttctcattccgtgtatcattttacaccccccctccctcctaggaaaatatacaaggaaaggagtgagaggggccgagggtcactcacattttacagtcagcttgagggggtcgctcctgttggagctgactgggttggagacctcacactgatactccccagcgtcctcctgcctgatggggtctatggtgagcatatggttaaaccaggacagcttcatcctcttcgtgacctgcagacgctggttgttgaaaatccactggaaagaggttccagtgttatttgtgtggcaggtcaggaccacggagcccttctctgtgactgtggtgctgctggcttggatggagggctgagccactgactctgtggatagagtgaccaacagaaagtgtcttggggccatgctgcatcctcagagatctcagagtcaaatttagaacattctcctgtgaataaaggagaaagatgaaggacagggaggagcagagagaaccagagacacccatagcagcgagcagtagggactacagtgacctcagagaccccagggaccaggaggacccagctgcctcagaccaggaccagggagccctgaaaaccctcccacagatgagcggccccagagtcacatgagatgcaatacctggggtggctttaggagcaggcagtcagagaaatggaacatgggtctcagcccctaagggacaaggaagaggtgtggccagctcctcctaggatcctacatccaggacccagtctgtaaagaggttatgattattcctttcttttttcattaattccctccctccttcatcagagaactactgagtgtgtgtctcagttgggccttgtgcaggtacagggtgtagtgggaagagaaagctgagtcctttccttcatcctcccatgggagtgacatcaacaaatcaagaaattcatgatttcacgtccagtgagggaagaaatgtggatctgatgggagaggcttggacaatcctggcattgagtctgatagttgagacaggtgatttcgttctaagtaaaaactgactaattctccatttgcccgtcattcctcagaccagaatctccctctctgagctgaggatgcccaagaagaaaggagctgaaccaacatctggtcctggggtccacagatgccccacggtggtggccacgaccagattctgggctgcagacacacggtggtgtgacgttgagcactgacagcctgtgtgatgctgatgcaatttctctttaataaaatggggtaaatgtcaatggtccctggcttgccatcctctctgtaaattaacattaaaatatttacaattacctgacctaaagcttggcacagaatagctccaaataaacatcatctattattattttactccaaaaaaaaaaaaaaaagagttctctgggcctgattcctggtggagaaggagcggtccagagtgtcttttctctgctttccctcctcctgaggacagtgcacttcccgggacatcttttaagtttcccatccagtttaatggcctgggaagtttgtttgtctgtcctctccactctgactctcaggtgaaagatgaggctctgcccttgcccagatggggctctgggggctgagccctgcctggtgaccagctctaggaaccacggccctgggacagctggtaaatcgttgctcacaatcagccctgcccaggaagccacaacccagccctggcacaggctccccagggtcatctggagtcaggatcttgggacaggggcctggggcaggggcttgaagggctgagcttctctcagaggatcctcaggccaggccctgactgagtcctataagatctttctcaggtcatgtctatgaggaggaggccaagcggggttggactgagactgattttcccccgctgcatctcccgcatcagactatccttcttgctgtagggaatttccacggagtccggataagggaaaggaattctgatctgttatagtttgtctcccctgggtgtgtcctgcactaaatgcccaaaccccaacatgggacgtaatgcagagggggatgcaggcacagcccaggcctgacaatcctgcgtatgtgaagcagaactgacccccaacacccagaggcacggaggaatcactcaccgtatacacggagatggtgagatgcctgttcaatctgagaatttctgtatgtgacttgtagggtgtagtatcccgtgtcctctagggtgacgttctggaaatgcagatctccactgggtgatattgtctctcgaccgctgtatgcaggccctggagtcctaacgtgagtgtctattacatatgctgcgattagctggttgggctccaccgttttccctttgtaccagccatagctgtaaagattctcgggcagataaaccacagagagatgaacattctccccttcagcaacttcaaagggcgctgatgcaataaagagccaggcagtggtgggtgcgttccagaaagttaaaagtgaggctaggaaagggagagaatatcagtcaatatttgacctatgcattggcatggaaagacggggtcctgggtgcaggtctcttcacccctcagccttagagggtgtgtgtgtgtgtgtgtgtcctactgggtcaaagtcagcagcatgaccctcattccttcagtacctctgaccttggcatttccttgtgtgaaccctctttcccaggggtctgcatggttccctccccactgccttcagttcctactcacacaagggaatccctgggagacttctttcgtgaagcctcctctagagaccctgggtcttccctttctgacctttcccagctctgttccctccagggctcttgtcagcacctgacctcacattctagatctctttgggtgtctgtcttcccccccatgagattgtgagctctgtgagggcatggacttgagtgatgttagttgcaccccagtgcctgggacaggctgcagactcctgtggatgagttcatgagcgttcccagggccttccatatcctggggtttatttgctaatgtctgaggttggcagatgaagacagagtttcatgccctggtggtgtttttatttaaattgtcactgtgatatagttttactatcattttcaaaatgtagtggccactgacaatgaacttgaaaacatggaccaactgagattgttttgccccttggcaattccagttcacttagattttttggttctccttagacgctctctcccctgagtctctaacaaaagccctctgtctcctctcagagccccatcctccccaggagaccccagccagtctctgtgctccctcctcccacccactcccagggagtcctcccctcacctgtgagcaagagcccctgccaggggatgcattctctgtggggacaagctgaggggggccccatggtctctgctgcctgctctgtcctcctctgtggagaggagcttgggctccaggaacgctctagacagggttactgtgactgttgtctctgctgtccttccttcctctatgctgagcttcctctcaggcaggagcacttcccgtttatgggcaagggcggggctctgcctacaatgtctctctgtcccctcccctctcagtcctgcctcccttgtccctcctttctccttcctttttgcctatatttggttccctaggcaaaactttgagaagcaacgctgatggggtcctcataacaggacgacccactctccccagtactgacctctgctgtgttctggccttggttctgtcacagccggtagattatttccctttgtgacacacaaaaccagctgggccctgggtctcctcatgctctccagtgctccaggaaggcagaatgatgcccagcaggaaagtgacagaggtggctctgggggctagaaaggggctcactgggtgatggctgggaaggacccacccgctatcttcagtgtcaccagcctggcctctgacccagggacagagacccaggcctggaggtctcgggaggatccccagctcctaggtgtggagggaggtgtcctgtgtgtcctgggaagagaggactttgatggaaggaggtgggaggctctgggttctgctgtccttggtgaaggtttcagggggaccctctccatgtctggggtctgtgcccccagcttaactctcattctctttgcaaatacatatattttgtggatctgcagttgcctgaactgtctcatgtccctaaatctttgtatccctttttacagaaggtcaggaagggtgtgtacatgagtatgaggactatctgatcagggcgagtgtttgtttcccaaagatctctttagatatggtataatacataagataaatgtactgaattagcaattttaagtgtagaattaaatgatactaattctattcacaatgttgtacaaccatcaccataattttttaccagaaaatcttcattataccaaatggaaacttcatacttttaatcaataactccccacttccccctgccccacccactggtagcctctgatactatcaatctctgtgaatttgcctagtttacatgtctcatataataaggaattatatacgtgtattatttttttctggattatttctcttagggtaacacttttaagattcatccacgtcgtagcatatattacagcttctttcctatttatggctgagtaatatcccaatatatgtttatacctcaattttaattcattcatctcttaatggacatgtgggtggtttccacatttttgctattgtgaaaaccgctgcaatgaacttacacttggaagtatctgtttgggtttctgtgttcatttctttgggggtacatataggagtataaatatggggtcatgtggtagttctatgtttaagtttttgagaaacagccaaactgttttccagtttgctgtgctattttatattcccatcagcaatatacgagggttccattttctctacattcttgtaaacacttactatttaatattttttaaaacttatagccattctagtaggtgtgaagtgatagctcattgcagttttgattttcatttccctggtggctgatgaagttgagcattttttcatgtatttactgacaattttaatattttttagagaactatttattcaaatcatttgctgtttaaaaaaaatgggttatctttttattattcagttgtaatagttctttatatattttagatacaagtcccttatggggtacatgatttgcaaaatttttctcatattctgtgtcttctcactttcttcatggtgttctttgaagcacaaacatttttaactttgatgaagttcacttatctatttttaattttgttacttatgctcttgatgtcatattgaagaaaccattgcccaatccaagatcattaagttttactcctatatgttcttctaatggtttgataagttttgctattccatttaggtttttgaaacattttgagttaacttttgtatgggctgtgaggtaggggtctaactacactatctcgcatgtggttatccagttgttccagcacaatatgaagaggctaccattctttccccattgaggaatcttggcacccatgtcaaaaaccaatgggctgtaatggtgagggtttatttctggactcttgattctattccattgatctctatgtgcattcttgtgccagaagcacactgttttaatgattgtagtgttttagtaagttttcaaattaggaagtgagtcctccaatttttttttccagattgttttggccattctggggtgacttttaaaaaagatgtagttcaatggttctcaaagcaggagtggttcagctctccttttttggcagtctggagacctttttaggaccttaatctaagtagataaattattcccactttcttttctgagttgctatgttacagtgtatattgacacccatgaaataattgagagaccctggaagtgcttgcctacatagtgagggacaattagttccatgatcatgggcacagaagattttgttttgggaaacaattttgttggtggagttatattcatgcttactcttttatttgtcttcatagcctgcatctccttcagacttcatatctgtttattttcttgtttgtcctctggggtttgggtgttgggtgaccagtcagctggagctggaggaggtgcttagcaaggcagtgaccctggttgggaggagcagggctcagcagggtgaaagtagctgggccttgagtcaggagtggcatctggaaggcctgactgtaagggtcagaagggccagcaggtgggtgtcctaggcacaaacggtggctgctgctgtggactggaggaaggtaagaggccccgagtattccatgttcttactggctccccaactgaggattcctctcctgggctggtgctgtcctgcagcagggaggggttagacagggacggctgcacatcaggccggagtccatgtcatcctcttaggcactgtcactacagattgaggattctgttcataagccaagcctttgcacaaggaagggacccgggctctcaaggaagagcagctcctggtcagacctccatctccttctctctcattgcctgaggcctcaagcttggtctacctggcacaggggtctggatcctcctcccagggttggggtcttactgagctgggcacctgcaggtgggagaagatctggaggggccccatctgccttcaccagattgatgttgagggtccctgagtcctgcaccactatcaggtgctgagcaacttccagtgtcagtgacaaccaccccatggtggaagcagaaccacctcgtgagaaagcacctccaagcctcagtgcttgccatgtgtgggaatttgctggtttcagttgggggcatgttggtgggtggtcatgaattcagggccggattctatgctcacagtgcacatgctggatgtggtacagaccccaggcagggctcagtggggtggttttgggtgtgcacaggtatcttttctggaggagctggtggtgatttggctcccagaagttcctgagctctgcagactcaccaagcactcaatatttgagtgaacattgggcgagagagcagaaggtaagtgtcagggcatcggggttggtgcctctgggaagaggaggaacattctgggaacaaagctctcccccggcttacagggagcttcccatcgctcctgccttgaggatcagggaaactagggcctctgctcttccaggggctgcttgcaggcagtttgctctgggagggggtgacccaggagttgcctctcattttgcatttgagatttaaaaggagaagggacagtatatcttgccaggtcacaaaaattacaggcatcatattgactgaagggcactcctgtcatcactgcaatataccagaatggtcttttaaaaaaataagtgatttaggtttaccagcaactgtaatgcttgttttattcttctagttcaccgttaatgtcacttttgtagttttagcactggcaatgttgattttatgttgactctgatgattttaagctttcatttgttcacatagagatcatcttctttctgaatattaatgcattttttctctatttctactggttattcctgtacatagagtagagaatcacttttcccaaggaggtggaaagcttctgactaccaaaaaaaaaaaaaagtgtcaaaatgctttaaagtcagtaacttaaagatcaaatccaagagtgggcaacagattctgcccagggtctgaaaggtggagaggtgactggtgaggatgtttaaaagacctctcctctctactccctaaatgggggccatccagtgttcttgaggttcagagaaggcccagggctggggcagcagggcactgtcagctcccagctcccaggggccaggagtaagaccccaacactgtccagacactgattgcattcattttgggggagagtagattcttatttaaagaataatacaaaagtctacaaatatgaacataaacagaaattcctttgctacaattttccccttaataagacattccttcctaatgacatatgtgactgcattcatggctgagatgttttctaggatggtgagagcatcagagtggactatctggtgccttggggtcatgcattttcttcttccaatgtctacaggatcccccatgtcccactttgtagtgtaactcagtgtgtgtcattctggtttttgttgtatagatccttggaaagcccatgtcattcctgctgtgaggtacaggcagccaaatggcatcatctctaaacatgccttctcctggtacatcaaattatggaataaatgaaagccattttgacagatattgaagatataagtttctactcttcccacacatgcttctcccaagtgaaggattttactggtgaattgttattagagattagtgtggatcagtgactctgccaggggaaattttgccctctaggggacatttggcaaagtctggaaacattgttggttgtcagagctgggggagggagtcctgctggcattgagtgggtggatggtgctgaacaccctgcagttcacagagccccaccagtttgaccacccaaatgtcaatgctgaggagtggagagccctgctgtgccctcccgcagcttccctgaagcttcccctcacctgctcctcccatgtctccccaccacttccccacttcacccgcctccttacacctcagtcccctccacctgaactcaccccttagtccaaggccagccctgatctccgctctcctggtctccttgctccttagcaggaggcgcccactagatggcgcccttgcccttactggagctcaccgtctccctttccaccctgagacaaatgtggctgcttttactgccacaaccccagccctccacactctagatttgctcagggagcagctcctggacagacctcagggaccccagggaggagcctcactctggagattttgatggcatggtctttgaacttcactgttacccccagtcaggatccaggatgttgggagtgcatgattctgcccggtcccacttcagcaggaccccactgctgagttgtctgtggggacccgggcctctcatctccttcttgcattgcaggagagggatcttagcactgctttcacataaagtcagataatggaggagtgcaggtgagtttgggaaggtggacatgaagagaggttgtgtccctagaggtggcagcagtgagaggatgggcaggtgggaggaacacagcccatccagggttgccagccatattaggagcgacagcctttcctctaagcctccagcctttttcctgaaacattccagaactttccacttcagcacttcccactgaggctcctcaggtctgtccctgagctcccagctgagcctacctacccatctgaaatcctgagtcctgtgtcaccctcgttccccattattctgtgcagttctgtgggacgcccagctctcctgacacccccagtcttcagaatggccatcagcgctgtcgctgtggcaccagggtgactgccgcctggaggctgagtcctggcttcctgacagctgtggggcccgctctaggctcccttgtcctgatcattcatcacctccaggatgcacagcagctgggccagggggaggagcagggacaggtgtcagccaccctgtgtgtctgcaagtcaggctgggggtgtgggaggacgccaggaatgactgaactttctgatttagagggtgagagcttgcactgatggaatttgggatttaataggaaaagcatagcgttttcctattttgtaggcagggtggctggagtttggaatcatagattcccctgggatgtcactgtggacctcagtcccacccgttaggggcacagatttcagaatccacaccctggggcaaagcaggcatgggaggctccatcagcctggccagggctctctatttgtgcagctgctgcaaggagatgtgcactctgatgggaacagtgctccctcctccttggggggcagtatctagctccctgcagcccctctccctgcaggccctgccctctctgaacctcaccttccccaacccgccccccgcaatcccatctcagctgtaatcccaacactttctcatccattatgggtggactgcttgagcccaggggttcaagactatgctggctggacaatatagcgagttgttgtctctacaaaaagacaaaaattagctgtgcatggtggcatacacctgtagtcccagtcactcaggaggctgaggtgggaggattgcttgagctggggaggctgagttggcagtgagttgagattgtgccactgtatacttcagtgtaggtaacagagcgagaccctgtctcaaaaaataaaagtaaaaaaaaaaaaagaaatatggaatacattattgttaactctaatcaaccatgctatgcaatagtccaccagtaataccagtaatagccaataatgaattatctgaaaaagaatacaatttattcttagctatctactgctaaaatttttaagctatcttttatgatagctgaaacaaaagaagtaaatttaaccaaggaagtaaaagacctttataatgaaaactgtaaaacattgatgaaataaattgaaaaagacacacgcacaaatagaagatattccatgttcatgaattggaagaactgatattgctaaaatgtccttaccacccaaagtggtctacagattcaatgcaatttctgtcaaaacaccaatgatattcttcgaagaagtagaagatcctaaaattagaaaccacaaaaattcctaaaacctgcacaaaacaccctgagttgccaaagcaatcttaaacaaatagaacaaagctagtggcattacacttcctgacaatcaaagcatactgcaaagctatagtaaccaaatcagcatggtcctggcataaaaacaagcacatagatcaatgaaacagaataaaaatcccagaaataaacccatgcatctctagctaactgattttcagccaaggagccacatgcacacaatggggaaaggacagcctcttcaataagtggtgctggggaattggatattcatatgcagaagaatgaacctagaccctatccctcaccatgcacaaaaaattaactcaaaatgtattaaataaagacttaaatgtaagaactgaaactatgaaactactagaagaaaatatagggggaaaatccatgacattggtctaggcaaagagtttttggataaaatctcaacagcataagcaacaaaaccaaatataaacaaacgggatttcatcaaactaaaaagcttttatacagcaaagaaaaaaaaggccagcagagcaaagagacaacctacaaatgggaggagaatatatttgtaaatatatacatatatatttgtaaatatatacatctgataagaagataatatccaaaatatataagaaaattatgtttctgtatagttttatctgactgggatacagaggccacatccacagtcccatcctcaaaggccacttgttcccaaaatgtcaagcacatccctcaatgatccatcatcaacacctatgtctgtaggatgaagggtgaatcatgaagcactaaaaaggaagaaggaagccaatcccaaaacaaaatgatgcagggtctggaaagtccaaagcattttttttttttttttactgcatcttcctcctttcttctccacattcccaatcctcactattgattaacaaaacaaaaaaaactgggacccaccatcttccctactgtcaggagatctagcgagattgtttgagtcttagaccaaactttgccataagccaaatttctggctgactttacaatgatatgagctagcacagtctctttttctgccagtcaacttgtgctcggttttatttgcaaccaaatagaggtggtaaccaaatataggtgaccctaaaattagtcatcaggatgaaatcctaaaatgtgcaacaaactgggttgaattcaggattagtagcaacatctctgttgtgggcttgaaaagggggcacccttttatgcagtagcaaaattgctaaattgttgtttgctgagtctttggactctcatcccggattttctatgaccattcaaacagggctgcaatgaacatctatggttgtttagcttggcacacttctacatttctatatagtaatatctagaagtgcatttgctcaatcacaagatatgcacattttataattgactgctatcgaactaccttaaatagccttaatttgttctcaacattgtttaacagggtctgtttaatgtcctacgtccagcaaggacagtatcacttttcttaatatttttcaaattattggaccttaacaaatacttaatgtgcaattaattgattcctttgtattcccatgccttcttttatatgtttccttatagtacacaaaaccacattattgtttctttacttgtgtcattccaccctggaccattcctatctaaactataacattatgagagagagagagagagaaaacaatatgaaaatataaattgattaatcaaaaaaatttaaataggacaaatcaggaagacacaagagagattttaaaattattcagagaataccacaatagctgtaccaatatattttaaaacttagatgaaacggacaactatctcgataaatgtaaattaccaaaactgactcatgaaaaaatggatattatgaatagagcaataatcagtaaagcaattaaaaagacagttgataatttttatttactgacaacaataacaaaatttcaggtcctgatatttttatggtgaattttaacaaattttcaagctcctcctcaaccaattctcagaaggtttaaaactttaacaagaaaacactttctaacacattttcagaagctgttatagcatgataccaaaaccacacaagaaaattatagaccaatctcacttacaaatatacatgcaaaatcaaacaaaatcttagtgaaccaaattcagaattaataatagcaaacaagcaaaatatgttatcatacgtatggcttatatcaggaatgcaagtatgtttcaacatcagaaaatacttctccacattaacagactaaaggagaaaaacgcttgtttaattatctcaataggtttttagagaattttgaaaattttataaagttatgcgtattctgtaaaattgatgaaatccaaccttgatttatttttaaaaattgcctttcctatagaattataggtaaaggaaacacatgcatcctcacagagctacttcaaggctaagttacttcccataagtaacgtatcctgtaatgtgtgcttggcacatattcaatactaaacaaatatttgcaaatcctcaaaccacttctcgctcaaataacccacctttgtcttttgcctttatgttagggttgattttctcaattgtatcttggagatcctttggtgggtctttcagcaattaccctgaatttgcttttctgtttacaattttaattcctgggaactctttcttgttctctgactgcacccttttcatgagagttcagccatcaatcctccagaaccccaccccccccgcccccccaaaaagcaataaagatgtctaaaagcttccttctgggctttcgaatgatgtttaccccaggcatttgttctattcgttcatcacccattttccctacaacttgcctacacttgatatcagatttttatttattagtcacctatcttcttcattggcccattttcctattttgccactggttgttctcaaatgtgttatgattcctggttgtacagtcaagtggttgataatcttggatatacgataaagatttgctctgtagctgtgtgtaagcctatataaaagcttttgtatttttcttcttaaaaaagacaaaagatggttgggaagatccctccagttcaccagttcgaggctgcagtgagctatgatagcgccgctgctctagcctgtctgtctgtgaaaaacaaggggggcggggggcgggggggaagactggagatgtaaatctcccgcagggccctacccgtatccgcaacaggtctctaacaggaacagcctcaggcctgtgttggaacaaggtaggttacagaaatctggaagccagatctgtaacttcagggtaaggactggctctcagggctgatcccccgggctgggtgtcccagaggcacccgcccccgccccttccccaaggcaggccaggacaccttcactcctctccttaggctccccacccccttctcctccccactgtgcctcctggagtagcggtggcggtgccacaggggagcggggcggggcgggctctgagggcaagggggatgggccccgccggggtcactggcggccaccctggaaactcgacgcaggccggcccttctagtgaatcgtcccagccacagctggcctcccagccgcgcttggggcgcctcggggcgcgaatggtgcaggttggggagactcaccacgcaccgtcgggggtcggtccggttattcctcaccgctcggctccagtgggcgcgcgggcctctcctcctcagttcctgcgctgcagtccctccctcacccttcgcagcttgggaatccaactgtgtcattccgacggagcgccgtgaggacctccgagggtgttagcgccaagtgatctctgtccagcgctctgaatatccaagtaaaggagttcaatgaagggcgggtcaacggaggagaaaccgtgactctctcaagggagcccaaggcctccttgtctaattagtgacgcgccaatggatggaggctcttcccaccatctcttcccagcatccagtgacaccaccgccaagggacgggctcggcggaacctgcaggaaagaagcatcggctgagcctgactgcagcgctgtgaagagacaggggaggggatcagtagttggtcccgcgcccaccccctgtttccgcgaggggcggagttgactggccatgcaggcagagggcgaaatgtgaaattccactactcctaccgtttttccctgacccgatggggcggagtgtcgtcaggctaagttccctggcggtaaggtggggagattgaggcgcacacctgccgaacggtaacgcaggattagctaaggcgagctcaggacagaagcctcccgaggagcaggagggcaaaataataaataaataaataaataataaataactcactccttggtctttatttgcggcaggaattcagaaggtgaaagcggggccttaggatctttctgaccttttgggttttaagcaggaggtgtcagaaatgttaccacagggctagctggcttgtggccagcaagcgttcacaatgccctcgatttttcatccctctctgtgggttctttttttcattgtaaggcagaatttctacgattgctcacccactcagagaacctgagctggtttagaccaggtgagacaggctaggtttaccctggtgatgatgtgttgttgccatggcgatcctgcccagtaccagaggccctgcagattcagatgcttggtgcctgtgcttggctgaggggccaatgggtgaagctgccatctgcgggatgatgactgaagcctctaagtcagaatccgcccaggctgagccttagggcagctccatggagcctcggctggcctgggatagagagtccaccactgtgccagcccccagccactgcctaggtcctgtgctgagagccccttgtccagggaaatggcgtccagtggaaaagggaccacccccttgcccttcactcaaggcaggttggtgacaaccctgaagctaatccgttcctagaggagctgcttctgggtccgagttttctctgcagcagagcagctccctggatgggatctgttcaaagtccgcctttcacgcggaattttccgtccttgcaattttccacctccaccactaggggatcctctctgaccgcctcatgccggctctggcctctgagcaggggtttctcttctgcatgtgcgaccttgcgcatgcctagtggccttttgggacctagagctgctccacaccccgatggggttacagagtgcctcgcctccactccaccccaccagggttccttccctggctgggatgggatttcagaagcgccgaggaacagcccagacaggtgtgggagagtagccaaggcccctgtcccggggtggccaggacagcggtggcctcgcataggacctggctgggctgctgcaatcagtgtcctgccccttggagagcaacagtgaaaacaacaagactatcttcacccaccttaagaaagaacagaaccagtatccccaactctgctgtgtatcccaacccaattccattccccaccccactctcagtagccaatatgcaaaatattagaatactcttactgttattattttcaaccacactctgcatcctgaaaaaccatatatttcgttatgtgcttttaaacttcttgaaaatgaaatactgaggctgggcgcagtggctgacacctgtaatcccagcacttcgggaggcggaggcaggcggatcacgaggtcaggagatcgagaccatcctggctaacacagtgaaaccccatctctactaaaaatacaaaaaattagccgggcgtggtggcgggcgcctgtagtcccagctacttgggaggctgaggcaggagaacggcgtgaacccgggaggtggagcttgcactgagccgagatcgcgccactgcactccagcctgggcgacagcgccagactctgtctccaaaaaaaaaaagaaaaaagaaatactgaattttcaaatacttgctttttttttcggtcaaaattatgttctcaaatttcactcctgtagatgtgcgtggctggctgtagtttttgcatttttattattaggtattctcctgttgcattaatatgccacattttatttctctcatgtttttggtgaccacttggggtgttttttggttttgtatttttgctgtatacatgctgccatggtggacatacctctttatacatatttcctgttgtatgcagacacaattttaggatgtgacatcttcagcttttctattgtgtcgtgtgtcttttccttcgtgctttgtgttatttacatattctggacacagattctttgtcaactgtatgtgctgcacatctctttcccagtttgtgtcttcttcttcttttttttttcttaaaaaaaactttctttatagtgttttttttttctttctttctttgttttgttttgtttttttgagatggagtcttgctctgtcacctaggctgaagtgcactggccgatctcggctcactgcaacctccgtctcctgggttcaagtgattctcctgcctcagcttcccaagtagctgggattacaggtgcctgtcaccacacccagctaatttttgtatttttagtacagatggggtttcaccatgtttgtcaggctggtctcgaactcctgacctcaggtgatccaccctctttggcctcccaaagtgttgggattacaggcgtgagccacagcacctggcctgtgttctttcttaagtagatgttacttttaatataatagaatgtatcatattttgcttttatattagtactttttctatctaattcaaacacatccccaagggtctttgtgtgtagactgaccaatttctcaagaatcatgaatgaatactgcttctctttccccaatttatctgtaatgctacctttattataaagtttctatgcatgtgtagaaatagttcctgatttttcactctgtgccaccagcataccaatagcacgctgtcttaaatattaaatagcagagctttatgagacaacttgatgtgcagtaggcaattgcccccttgttactcttcttcagggttctttgttgtaccacatgaattttagaattggcttgtccagctaaaagacaactgcaaggattttatttggaagttcataattctatacataatttggggaaagtattttcataataccaagtcttcctattaatgaacacagactctctctctctctcccccacccccacctgtttagttatttatatctttatggtctgttagttattgtttattgtctttcaaccaggtttcatgtttttctacatagaggccttgcatgtgaaagtctttcttcctagcttgctattacaaattttttttaattgcactttttgggtacagtggcttgtactgtaatccccgatacctgggaggctgaggcagatggattgcttgagtccagaagttcaagaccagcctgggcaacataatgaggtccctgtctcaaaaagtttgttttaaaaattgcatttgctgttattcaacaaatgtcattgtgtctcatatatggatttttatatctgataaccttgttcaacaatcttttgattctaacaatatatcagattcttttgagttttccatatagacaataatgtcatctgtaaattataattgtttcttctttgttatttcttggaccttttattttatatttttgtcttgctgcaaggcaatatccctctatatattgtggggtcttttttctcataaagtggggatggtgaacacccttgtcttgctctctgattgtataaagcatgctttctgtagcattttgtagacgctcttttttagattgaggtaattcacttttatttctggtttactgagtttttagcataaattcaggctgaatttgagctaaagctttttctggagacatcatttgaaaaattcatatgatttactttctttaagtcaccaaagttatgatttacattgaactgagtttctactgtttaactgtattcttgggagaaaacccacttgtcactgaacaatatctgttttatttactgctgtcttgtgtctaaattttcttttaggattttttgtatatgctcagattagcctgttattctcctttctgtatttttttctggtttgggggtcaaagttataatagcctcacaataagagctaagaaaccagccctaatggaggccggggcaggaggtttggagttcaagaccagtctgggcaaaatagtgagacccccatctctatgaaaaatagaaattagccaggcatggcagtgagtacctgtagtcctaggtacttgggagggtgaggcaggaggattgcttgagcctaggaatttgaggctgcagcgaactatgattgtgccactgtactccagcctggatgacagagcgagaccctgtctcaaaagaaaaaaaaagaagaaataaaaaggaaaagataaaagagctaagcatctgtttccttttttccattttctgggagagtatgtgtaagactgtaattaactgtttcttgaataatgggagaactctgtaaaataatctggctttggtgttacctgtattggaaggatgaaaaataccaattcagtttcattattggttgatagggctactcatgctttttgttttgttttgttttgttttgtttttgagaggaagtctctctgtattgccctgttgtccaggctgagatgcaacgttgttcacaggcctgatcctggctcactacagcttctaacttccgatctcaatagatcctcccgcctcagccttcccagtagctaggactacaagcatgcagcatcacatccagcctcttttcctgcctgacccagttctggtttcctttagttttctaggtgttcatccattttatctaatgtttaatgcatttggcataagggtgctcagtgtcctttcattgtctgttgtctgtaactgttgccattttcattcctatttatgagtactggcgtcttctctcactttttcttaataatcctgctggaactttgctttttaaagaacatcttttgacttgttgattcttttttcatacatattaactattttcttattttttgcctttatatttatttcttttcctgtttgaaacattgctcttttcttactataaaaatgggtaagtagctcatgaattaccacctcttttaaaaatcttttctactgtaagcattttagcagtttacatttgcccacaagtaccacttcagctacaccctatgtgcttttacataaagtcttcatttttggtaagacatattctcaaattttaattatcacttgtttttaaatccatgatgttttatttgaaatgttgtttctaaagatacattttctggttatacttttattcttctaatttagcacagtggccacaaaacatggtctgtgcagtgcatacaatcgatgagtaatttctgagctgtagtatttggcataatatatggcaaaatttcctaagttttccatgtgtgctttaaaaaacttccagtaaaatacataaatctgttagatcaagcttctcacattgttcaaatagtctatatgtttactgattcatttgactgcttgatttatcaattacaggtaggaatgtattcaaatctcctattaaagtgtgacactcaagtggctttttaaagacagagatgccaaaccaatgaatacatgattttccccaaagcctgcacaaattctctaatgaaattttaccatgaaagtttgtttaattaaggcttactaaagcagtatgttgtcttttactttttaaacagagaatatatattttaatacatcgtttaagtttatgattaattatctattactgaggataagaatctttgcctgtgctcattcagcatttgcacttcatttatgatctgccttctcatagcttctgttaatttttatactagagacatttatttgtttgtataaatgttgaaggtttttttttgttgttgttgtttttgagtcagagcctcgctctgtcacccaggctggagtgcagtggcatgatctcggctcactgcagcctccatctcctgggttaaagtgattctcctgcctcagcctccagagtagctgggactacaggcatgtgccaccaagcaaggctaatattttgtatttttagtagagatggggtttcgtcctgttagccagggtggtctcgatctcctgacctcatgatctacctgcctcggcctcccaaagtgctaggattacaggtgtgagccaccgtgcccagctgggttttttatattataaggagatgtaatagatagatagatgtttcaaagatagtcaaatgtttttaaaatttaaaacacttttttacaggttgactttcaccatttaatttcatctatgtgttttgccttagagaaattttaaatgctatgtagatctcatgacttataattatgaagcattttgttttctgttttccacgaaacttagcttaactttgagcatataatagttgtaaaggtaggagagtaacactgaaaaaaggaattgcataaaaatggcacattttctgtagagttgtttatcgcctgaaaataggccccatttcatggaagtaagatgatcaggctcaggtccccagacgaaactcttggcatggtttttggagatagtccagggctcagtactggctctatcatttgctacttctcccaaagtaaccaatatctcatccaccctgagcccatttccatatctctaacatgaggataatagcatctaccttacacaccaagtagagggatcaaatgtaggaactaaatcaaagtaccagcactgaataacctacatcctcccacttcccaaaaggaagagagatgtatcccctgttgacaaacgagaccattttgcaggagagaaaggaaatgccagttcacttgcaatgtaaacatgctctctctttttagggatgtccagggacctgagagagaacccatgcttaccaaagagtttctagttccagacacacaggactcgaagggtgacaagtatggttttcagggtccctgaatccacccagtcctcacagaaactcctaaaagctgtcgattgacagcgttgagttcacagctctggtcctcacatgctgatactgcttgtgatatcgaacccgacaggaccccacatcacaattgatttaccaactacaatataatacctcctgaatctccaaattggctcacccaggaacaaaggcttggggtaaaactggattaggagatataagctctgaattttctgagggtgagacacacaaggattctaagtgacacgccacagagtaacgggtctgtgactggaggacccacagatttgtcttactggagacaccacatgcacacaaactccatccttagctgtggaaacaagggtcttttgctatcttagccgaattctgggagtaatttttggaggggaggagatctttgggattgcctctttcaggccctttacaaaaatacctacttcttaaatggtaaagcttacactaaactgaaaaaattacatccttggctttttatgaagtaggtgttggattgaatcactactggaagaagtatggcatcgcaaattctaagcagtggtcaaaggatggatctgttaaattagaaaaatctctaaatttataaaaagattttagattcctttattctaaacaattgacctatttgtactcatgggacaatcaaatttcaaaggagatatgtaacgatttcatggcttgcattaaaaatccttctgataaaattaaagataaaaaatctgaccccctgccaaaaaaatcttttgaagttcatactgcctgctttcaatattctgtgggattcacaatgaaaggtgccttatattgtggcctagcttcaagtttatgccttcgccaccatggcctgggttcaattcccagtcagggccccagcgcctttggtttaatgtttgcgtggcatttgacttttttacctatttagtattggtgagattacctttggtaaaaaaaagtttaaagagtggaaatcgcaattctttgtgttggctaaaatctgattataagagatctggaaggttttatttttctttttcaaagagctctatggtcagaagtcggcttcatgaaaagctaatatttaattatatgtacatacagtctttctggattttctcttttgcctcctgttttgaaaaatatttggatttgagtgaaactccgttttagaaattaattgcttggtacaatatacccatgtaactaccctgcacatgtaccccctgaatctataataagagttgaaattttgacaaaataaaattagattttgaattaaaacaaataggtgcttggttcctctgctcacttctttttaaaaggaattcctctcccatgtacttcttcttttcccttctttaccttccttttggcatctttggtatcacatgaagggatctagagggaattttaagtgactctgaaattccttgagaaatacacaaaaagatcccactcaccccttttgggggtctcctgttctccttgtggagtccagagtcagggacaggctcctccaggtctgcagctctgctctcttttatttcatcttggctgattgctttggttttgtgagtaccaggcattactttgtactgtgagagacacgtcctttgtgagtgcaacggctgctgggtcactggtgagggctgcagtttggagatggctgagagccgttgcaataaatggttgtgattgcagggggctccttgtttctttgcaagtttagatgagaaaggtgcagtttggacacagtttaaaggctgtgaaaacaccaccaatgaatatgatttcctttggggatggtctgattaaaagtgggctgattgttgctgtgctactagccttgaagacatgtttctacagcattgtgcagtgtggaaaaattgtgtggcttggtcttgtggcatgtcccttcttttagagacctcagattcaatgtgaaattcgggatttttgattttcaaagatctagatgccctgccttccagatgtgcctactcttcacatattttaaaattagatcctataaactgcaaatactttgttggcttctgtgagatcagaggtccagttagaaaaggaagacagtttgttaaaattaaaaactatttatctaatctaactagattggcctccaaatatgactttctgacattcagctggttactctgaaaagatttctaaatctcttgaggctcatctatatgtttccttgcaaagaaaaaaaaaaaaaaaaaaaagcaagcccaagcactagtaagaaaaagatttgcaatgtttcatgaaaggagtagatgagtgaagcatttatttgtagatactgggttggatacctgtgcaaagaagaagaggtcaataataaaaattgccaggggatttcttggaacttaacaagctgaattaaatatagaaatgtcaggaaatcaaggcaggaaatactcacttgtggttaggcagacagggcagggttctgagcttgagatggagcaaacagttgtggtgggtgaagttcacatgctttagagctcagctgtcctagtaaagaagcctaagagtctctaaagctcttatgagaagatggattttttttgcctagattaaaaggttaaagaattgctttaagttggataaaataaagctaaatgtttaagcaagttgtgaaaggtttatgaaaaaattaattaaaatatttttgtgtgtaaacatattgactaaagttgaaggggtataattcagcatttctgtaaattgagcattgaaataaaaacacaatgggtttctcttagagcactaacctgctctttaacaaaaattgtaaagggttatagaaagtctataaaaatgttaccttatggtcaaacattaaaattgggtaaatatgtctatcaggttttattaagaattaggtttaacattaatagtacactaatgtaaaggtgaaatttggcttatttggtacaaaaatcatacaggaagcattgtgaaatataaaatgatttttagctttctttgggctatatttctataaatatgttattgatgagggttccaaagttatgggagactcctataattctgctatatctcagtgtacattatcagtcataattataattgtcatgttaaattattgtgggccacagaggtaacagatttccttgtcaattgtgtctttgactatgactaccctaaaacgttcagtcacccatatacacatgttaccttgttttggccctctttagaaggtaattttataatcagctataaagccctaacaggtgctcttaaatgcaaattttgataactttggagattgtgacatcagaagagaggaaaaatgttcgggacacttggagagctaaaatgttcattgatatcaagcaggacaggaattaactgcatgaagtgaactaataggaggctgaagtgatctttttgactttttgcttaaaacgttgctgatcctttgttttgcttttcagagtcaaggcaaattttcttttgagctattgacagcttttaacgattaatcaaaatatactcctatgaacaccatttggagcattatttgtttctctctacccgatttccccagaatttggaaactatttgtgggtattcttaatttatggcaatatagttatttgcataagtgcaataagaatgtgttttctttggtaacaggacacaatttgaaaaactggttattttaccaaggttttgaccagaatgctgtgctttcctttaaggaatcaaacttgacttgtggagctaataaagcctttggaaaactgaccttatatcctgtgaacacagtccctgtacagggttactgatctgtgggaagaaaagaatgtcacattctgacaggtcaggaatcccaagttatcttgaaacttcaagaggacaggaattcacccaaccatatgtatttgatggtagaaatccatggcaggggctcagctttaaaaagtcttatctcagattccttctataaaacaaagtcccattaaaaccaattttaaaagcctatgtgaaaaataattattcttgctgcacctcgtacaaataaagtggcaaagcataataaagcaaattggtcctgtcgtaatttgtctttagtaaaaacgggaaactggggtcgggtgcagtggctcactcctgtaatcccagcactttgggaggctgaggtgggcagatcatctgaggtcaggagttcaagaccagcctggccaacatggtgaaaccccatctctacaaaaatacaaaaatgagccgggcatgatggcgggtgcctgtaatcccagctactcaaggggctgaggcagggaagcggaggttacagtgagtcaagatcgtgccacttcacgacagcctgggtgacagagcaagactccatctcaacaacaacaacaaaaaagggtaactggagagagggaagttatgtttcaaaaacttttggaaactatagtacacctgtttttaaattctagtctggcattcagtttttattattttctacagtttgggttaaattcgtatttctctggctacaagtctcctaaataatcttttcatttgtttcctttttctttccctttttccccatttttcttaattggaaatcactgaaacctaagctgtgctttcttaaagccctgtgaactgaagactagacaaccgaaacttctgaaggaagtagcagcaacctatttatatgtgttgctgttgcctactattatgttttagcaggtgctgcctctacacccccgaaacagagagtgctactgggaacaaatcgactttttccactccagtgctgcattcggtgccccataacgatgaccccctctcagcaggaagtagccagaaagattacaatgctccatctccctatgattcttgtgataaataaatatacaagcatgatagaaatcatgcgcaaattgacagtggggattgtggcaggccagatttcactaatggaggtccccatcacaactacttcagtactgactgagtggttaagttcagtatcaaaagctgaaagtgccagcgcctttctacaaaggctagaatgtaacaaaagcccaccaagggttttacctaggcctttcctgggccttacagcatgacaaaacaaagaaggaattcttaaccagacctgtttaggattaaacaaatttaattgggggtctgaagaaactcgccaggcctccacaaacaagttcattgggggtctaaaggaaccccccccaaacctctgtgattgagcaggagacaaggtcagggtaattgccccagcacctggactcatttagatttaagtaaatgtactgaggctccagagaaaggtctccaagacttagactagagttacagattaaaagaagttaatcacttatatctttagataaatgcacactgacacgtagacatacatcttagaaaatatataagctctggaaaaccttgtaatttacagttggtctggagatattttctgggccttctctctgtaaccggttccagaaataaaaaactctcttcctccccagtttatctgcatctcgttattgggccgtgagaaatagcagccagaccctgagtttggtctgggaacacactggctgggcttcctgcctggcggtagagcttcactgtcctccttcccagccaaaatgtggcccttgaaggcttcctccccaactgaccggttttgggttctaggtactcagggaacaccgtcttcaaggaggccattttcatactgttcctggtttgatttttctgaaattaggaaatgccccttgaggcatccaggattgtctttatttcccctgaagcttcccctcctgaagaaaaaagttctcaaacaccctcaggactcaaaccccaagttcaccctgtgaaacattcccatttcctaaacccaggcaggctcatggccctcagcctctcagaccccatggaaacctcctcccccacttcacgggttctctccatattgagagcctcccctcctcggcacacaacccagagactcaccccaacatgtgtagcaaatcaccctggaaacaatcatggctgaacgtggtagcccatgcctgtaatcccagcactttgggaggcccaggaggtggatcacctgaggtcgggagttcgagaccagcgaggccaacatggtgaaacctcgactctactaaaaatacaaagttcactgggcattgtggtgtgtacctgtaatctcaactactcaggaggctgaggcaggagaatcacttaaacctgggagacagagattgcagagagccaagatcgcaccattacactccagcctgggcaagaagagtgaaactacatctaaaaaaaaaaaaaaaaaaaggaaaaggaaaagaaaaaaaaaatcatgaggcaacattgcatttaacaatattttatttatcaaaagacacttgtctttctcaggtaagtgaaggtctagagatgaaacgagtcccgatgtaaattgccccatgggcattgctgagatcacaagatcatcactgcagcatgcagcacaatagtaaatttctcaggatggaagttcaacaatccaaaaggtagtattttttttcatgatgctcagtccatcatacgaaataaaaataaattccttttcatgatcatccattcagtagaaaaaatgatagtaaatttgttctcatgaagatttttaccgtaacatataggatttatcgttattattattattctttgttttttgtttttttgaagcggagtctcactctgttacccagtctggagtgcagtcgtgcgatctgggcacactattaacctccacctccagggttcaagcatttctcctgcctcagcttcccgagtagctgggattacaggcatgcgccaccacacccggctaattttcgtatttttactagagatggggtttcaccgcattggtcgagctggatttgagctccggacctcgggtcatccgcccatctcagcctcccaaagtgctgggattacaggcgtgagccaccgcgcccggcctcaatttatcattattcacgcatccacaaactgggttcttatattttgtacgtgattttttccattgaggagagatatctgtgcatattcatgctgctcatatttcatccacaaactcggttcatatttcatccacaaacataattttttccgttgagaagagatacttgtacatatttatgctgttcaaattcacatttcatcattcttttacaagaaatagataatgtattttaaggttttccagtggtattacagatattttactgggtgtatagatagaaattaaaccaaacttctttgttctggccgccagtcatgcatcctgttttcaacatagttcacatacaactggttgtgtaaaaatgaaattattttgtttagtacaatcatcaacagttggttgattagatttttaattatcaagttaatcattgtcattatgcttctcatcgcactcgtcattaattgctgtgggaggaaatttgttatgttccctatgagagggtgtatcacaaattcaaataagaattcaacgacaatggactgtataaaggaaataagcaagtccatggaaaacatatttttttccggaaaggattaaaatatttttaaaaaggaattaaaaaaaaattgggcacggtggcaaatgcctagagtcccagctgctcaggagatggagacagaaggattgcttgagcccaggaataagttggaggctgtagtgaacagtgattccaccactgtactccagccagggcaatagagggaaaccctctttctaaaaagacaaaaagaaacaaaacaaaacaaaaaaacaccacatcaaaaaacccaacaacaaaatgaaaaaccaaataacagcaatacaattggagctattcgatccaaagaagtaaatgaaacataaagcaaataaaagagaaaagctaatacctgtgtcctgcaggactcagtccaagttctgctctgactccctcctggtgagccaccccttaaaaagtcacttggggcggggttactttgacagacagtcttctgtcaaagagggaggcggtaaatagcacttttttttttttaatttaacgcctttccaacaaattagcggctatgttgtctaagagtgcaaatgtcagaggtgggtacaggcagcaagaccctccccacaggggcagcagaaggaggaatgactaagggaacaagactttagtgtgctcaactacacaggacaggaaacagatgctttttacaaaagctggtggacttgaaggcagaatattttcaagttcctgtaactgcgaactatgacctgtagcctgtgagagtgactttctgtggcaaaggagcttttgtgaatgtgaggaagttaattatcttaacagtgggaggttctcccggcttatctagctagaccctcgtgaaatcccaagtgtccttaggaaggggaagcagagagagatttgagtccagaagaggaagaaggtgatgtgaggcccagtaggggaacaaagggcgatggcatgtaaacacttagcccccagaagtgggagagggctggggttcatcacaccagaatccctaacaatcagccttattttaattacccttgaaatggaaggaggccttagagagccagaggcttggaggggcaccctctgctgcatacacagatcccaactgctgtgggctccaaataattgcaccagggaaatcacaaattatcaaaaataaaggatgtaaagcttttaaaaaatattaaaagcccaacaaataaaaaaagttctaaatctataaaattgacctcagtctgtatatttagatgagtcatgtgtatatagcgtttcacttcaaaatatatgataaatctctcattcattggcttaaaaataaacacttcaatcaagtctttatcagaaaaattgaaacgttaactcaattgccttttagttcatgtgactttacaaaacttaaaacaataaagtcagttttaaaaattattagtaaagtaaaagaaaaatatcttcacaatgtagacattttgtccacatgagacatgtgaaatattgccattactaaatatttgcaggtcaaaaactgtttccaaaacattttaaataatcatctggcctgtctgttttagagcattcaattctagctgaggtctggggacatgtgaaaggagccacggcccgactccgtgctgggaagagtcagacattttccacagctctgtcctttgctgtgggctctgcaactcctaccaattaaaattgcttacgtttttgttttatttttactaaagaggggttcctaaaagctaacattatactgagtatatgtaactaaaactactaagaaaacaatttcacaattatacaaatgtgccaagtaaatgaaaaaataaactgtattttaataaaggttataaaaagaaaaacatatagtggtgtgaggactgtctcaggtcttcactgagcaagggatcatgacattctatggcggacagctgaccttggctttctgctcctcttgattatgtctactaagtgacatacttactctttttccacctgtcttgcctctaagggtaacaggttttatgagatccctcctagtgctttgcaggtcagcctccctttgctgcattccaattttactgcctataccctccagctggcttttgatgacaaaagtcctggtcccagccattctcagattctgtcatccccgtgggcactatggagctcagcactatgggaggttccccaaaaatctcgttttctatgaggaatggccaccacctgcatctcagtgatgctagtgacccctttcctactcctgtgctcactggtcctcatgaagatcctggttggtctgtagccccctatttttcctattaaagagaaattacagtaagacccatttgtgtgcaaaatcaattttaggcttattacacttggcctgataatttgcataaaatgcagcaagaattcatcggccatataggctacttttgagttaattttcctgggtttttacctaaaaatatactattttggttagagtcttgtgaaaataaccaatgtgttcaattgttttattttaaaaggctcttactgaacactataaatatgtataagttgaatatacaaactatattgtcataaaatcacaacccaaaatgtggagaacgcagagggaaaggtaaatttgctcgcaaaaacatacttcacccaaataactggaaaaaaaaaaagactttcatgacccttctttaaccagagcagcagctttcaaacaaggtgtttgccttggaaatgccattcacaagccaaacggcccttgagagctgtctgtcaggcactgtagaatctagcagctcctcacagagttagaaatagtttcaggaaagagattccctgcttttagtaactgcactttatattcccagatagcgagattgtatgtaaaccatttttatcttattctggaactcttttgggtactttttttttttttttttaaatgatggagtctggctctgttgctcaggctggggtgtagtggtgcgatttcagggtatgagaaaatgcagctggacctggctctttccaggaagaccctcacagccaaggagtccaaagcctggggttttcatctaattccagtgtgactggggtaggagcagctttggtgctgggtgtgtgtgtgtgtgtgtgtgtgtgtgtgtgtgtctatgcctgtgtctgtttagggtgttaggctcgtggttgtctagatacaaatgtcccagggctcaggagccccagggttatgtcaggggcaccagatgaaggtgtcaacagaagttagggcacaagggacaaaggtgagagcaaggttagattcatttaggtgcaagaaatcatagagggaggagggagaggaagccctcctgctaccaccgaggaagaagcgcagcttaaggcagaaagcctgtccggagaggaagtgagtttgagggcagggctctctgggtaaagtacggtctgggacaccagcctgggggaagggtacagaatgcagagtggcctggcgtggggactaagaacagaggagagcagctttcactgggagggtcagtgttttcagtgtccagcactgagcaaggtgagatttgggcagcttgctgtgaaataaggtcaggctctggcattgtccccattgcgtgtgtgtgtgaggggcactttgggagagtgaactctccacctccatcctctcatacgtccttcaaccgagcttgccagttaccctgattccaaggagatctatttattgttgacaatactggatcctagcagaggctgggtaggagcctgggcacaagcaagtggaggagggggcctgggcctgaaagacctgggaggtttgagagaggacacagcccacagaatggagcagatggggtagagtcggcaagcattcagggctcctagtaagttggacaatggagaccctgaaagatccagtaaaacggggagaacaaacaggtccccaactcacatccttgcagtgcctggagcttcagactccagacaggtggggaaggaaaattgagggatgtgaacatgttggagaatgtcgtgccctgaagaatgaagaaaaggggggtgaggaatgagagcaggaacggcttccagtgcctggtgcccaggagaactcagaaaatgggtgtggtggagaggaatcgaggaaccggaagtggtggaagtgtgcagggcccctccgagatcactgtgactgccaggcgtcctccctggctggagagcttcactgtcctccttcccagccaaaatgtgtcccttgaaagcttcctccccaatggactggttctgggtcctatatatttgaaggggtggcctgcctctccacacctgtgggtatttctagttgggtgggaggagagacagagaaaagaaataagacacagagacaaagtataaagaaacaacagtgggtccaggggaccagcactcagcacaccaagggcctgcaccggcaccggcctctgagtttcctcagtttttattgattattattttcattatttcagcaaaaaggaatgtagtaggagagcagggtgataataaggagaaggtcaatgaaaaacatgtgagcaaaagaatctatatcataattaagttcaagggaaagtactatgcctggacgtgcactcaggccagatttatgtttctctccacccaaacatctcagtggagtaaagaataacaaggcagtattactgcaaacatgtctcacctcccgccacagggcagcttttctcctatctcagagttgaacaaatgtacaattgggttttacaccgagacattcagttctgaggggcaagcaggagacagtggccttcctccatctcgactgcaagaggctttcctcttttactaatccacctcagcacagaccctttatgggtgttgggctgggggacagtcaggtccttctcatcccatgaggccatatttcagactatcacatggggagaaaccttggacaataccccgctttcaagggcagaggtccctgcggctttccacagtgtattgtgcccctggtttattgagactagagaatggcaatgacctttaccaagtatactgcttgtaaatattttgttaacaaggcacatcctgcacagccctaggtcccttaaaccttgatttcatacaacacatgtttttgtgagctccaagttgggtcaaagtggctgggtcaaagtggctggggcaaagctacaaattaacaacatctcagcaaagccattgttcaaagtacaggtctttttcaaaatggagtctcttatgtctttcctttctacatggacacagtgacagtctgatctctctttcctttccctacatatattcatggaccacagtcttcaaggagtccatttcctcactgtttttggtttgatttctctgaaattaggaaatgccccattgaggcacccaggattgtctttacttcccccagagcttccactcctgaggcaggagcttctcaaacaccccccaagactcaacacctaatttcaccctctgaaaccttcccatttcttaaatccaggcagggtcatggtccttagcccctcagatgctgtggagaccttctttccctttcatacattctctcaagattaaaagccacccctcctcagcacacaccccagagactcaccccaacatgcattgcaaatcaccctggaaacagtcataagaccacactcatttaataatattttatttatcaaaagacactctttctcaggtaagtgaagttctggagaggaaaagaggagtcctgatgtaaattgccctgcaggccttgctgagatcacaaggagattgttactgcagcttgtagcacaatagtaaatttcttctctggatggaagttcaacaatccagatcgtagtatattccttttcattatgctcagtccagcaaatgtgatgataacaaattccttttcatgatcatccattcagcagagaaaatgtttgtaaatgtgttttcatgaagatgtttaccataacatacaggatttaccattatcaatgcatccacaaactctgctgttgttttttatacataattttttccatcgagaagtgatagttgtacatattcatgctgttcatatttcaaccacaaactctgctggtttttttatacgtaattttttccattgagaagtgatacttgtacatatttgtgctgttcatatttcatgtttcatcatccttttacaataaataggttatattgtattttaagtttttctaactgtagtgcagaaattgtactgggtgtatacatagatatcaaaccaaatttacttgttctggctgataatgcatcatttatttcatagattatgtatttctttgacacatttcacgtacaactaattgcataaaaatgaattttcttttagtatagacatcagcatgtgcttaattcggaatttaattgttgagttaaacatcgtcattgccttttccgttgttattaattgctctggtgggaattttgttatctcatacataagacagtgtgccacaatatctcttaaaatttcaatggcaataaactttatatttaaaaacagggaatctatggaaaacacatttttttctaaaggattaaaatatttttttaaaataattttctaaaaagttaggcacggtagcaaacgtctagagtcccagctactcaggaggctgagacaggaggattgcttaagcctacgagttgggggctgcagtgaactgtgattgcaccactacattccagccagggcaatagaagttaaccctttttctaaaaaaaaaaaaaaaagaaagaaagaaagaaaaaaagcaacaacaccaaaacctcaccaacaaaatggtaaagaaaaaaaaaacagcaatacaatgtaagctatttgatccaaagaagtcaatgaaatttaaaacaaatgaaagggaaaaagtaatacttgagtcctgcaggactcagtccaagttctgctgtgcctccctcacggtgagccacccctttagaagtcacttgggtcataagttaacccgataggaagtgtcctggccaatgaactagggaggtggtaaatggcaccattttaaatttaaattcacggccttttcaacggatcagtagccatgttgggtaagagtgcaaatgtcagaggtgaaaagaggcagcaggaccctcccctagtgcttgggcaacagaaggtggaatcactaaggggacaagactttagcatgctcaagtacacaggacagaaaacatgctttttacaaaagctggtaaatatgaagagggaacattttcaagttcctgtaaccaagaactaccgcctgtaaccggtgaaagtgactttctatggcaaaagcgtttttgaaaaggtgaggaagttaaatatcttaatgttgggaggttcttctggtttatctggctagaccctaatggaatcccaagtgtccttatggagcggggagcagagagagagatttgagtccagacgaggaagaaggtgatgtgagtctgggtgcgggacagggggagaatgatgctatgtggggatctgggctggggaatgacttagctgcatgagcggagtgacttagactcctgaactagaagaaatctagggctcatcacctcagcagccctaaccatcaaccttatttttattacaggtcttccatcgacggactccctaaaaagccagcggcgtggaggggcgccctctattggacaaatagatcttgactactttcggccctcaaatagcctgactaggcaaataacaaataataataatttttttttaaatcatggaaaatattttaaaaaacaattaaaaagttataaatctataaaatctgcttctgtctgtgtgtctgtatatttagatgtctcatgtgtacataatgtttcactaccaaaatatatgatgaaaccctcattaatcggcttagaaaactaaacacctaaatattttctcagaaaatacaaaaactttaactcaaatcccttttaattcacctgactttaaaaatctttaaaaaataaagcatgctttaaaattattagtaaagtaaaattagaacatcttcagaatttagacatttggtttaaattatacaggtcaaatactgcccttagtaaatattttcaggtcataaacaactcctgtaatcttttaaataattgaattacatgtctgttttagagctttaagttctagctaaagcctggggacaaatgaagggcaccatgccccctctctgtgctggaaagagacattttctacagctctgacccttgcagtaggctttgcaactgctacctatcaaaattgcctacatcctaagtttattattaaaaggagttgcttggagttaacattataatgaatatatgtaactaaaactatttctcatacaaagtatatgaaaaagtagaatgtatttttaataaaaagttataaaaagacatgaacatgtagtttttataaaaaacagtaattttgtctagttttgcagttctaaaaagttatgttaaattcaaaaataaaaaataacaagacaagactcaaggtttaaataagttgtaaaagatttgtaaaaattagttctataaaaattttacaaaaaaaagcattggttaaaatttaaggaattattttgtttttacagaaattaaacattcattaaaaacactctgatacaaggccttaatttgggttcatgtatcagaatagcagggttttcttagaatattaatctattctttaaaagaactatgaatgttatgcaaactttataaaaatcttaccttagagtcaaactgattaaaattccatagattttacgtaaaattttattaaaaattaacttcaacaaaaataaaatttgattttctcctttaaacaaaagttttgcgtaatattaaataataaagcatttttgtttaccttttaaactataaacacacacacacatacacatacaccaacactaaagtcagctgacctcatactgtctttattggatattcttgtttaaaaaactatcttctttggaaaataaagttttttattttaaaccatattttaaattatcattttgactaaatccataacatacagtgatctgtaataattctattttataatatcaagtgttttgaagaactccaggaacagccatgagagaacactgtggtttagtaacactttatttcctcagtttgaaaatagttgtctttcttggggaggccggtttcagcagatgaaaacaagagtcatgatgaaaattacccagcagtggttagtgtgaccataggaacattgtcatcaggtcagcagaaaacatatcagcaaatttttctcatactggcagtgtgtaggggtggatgtttacagttcctgaagccccagtggtcgtgtggtcttttagttttgccatttataggcaacttgtggtaactagctcaattagacacattccttatcacaaggacagagggctttctgtatcctagggttcttgccttggcattccagaagaatcaggtcacacgtggacgtggagaatgagtgcaaggttttattgagtggaagtagctctcagcagatgggggagccagaaaggagattggtttctccctggattggggccgttcagcagccctggctctcctctgactgccccaggcaaaatccacatcgttctataagtcggtgccctgctggtgtgctggtgcctgttgtcatgttcctcttcatgtccagccgcctgtgtgttcctccgctgatgtgctcctctcgacgtcaagcctcctgtgtgtctgactgctagggtcttggggtttttataagcacaggatgggtcttagcaggccaggatgatcttgggaaagacaacattcggtcaggaaaacaaaaatgcctgttgtcatctaggtccgtggggacaagcccaggtgtggagcttttagccagggaccacagcctcctgtatccaacacttcccttcaccttttctatatcattcaaagggatcatgcccttcccatcccagcacttcactttcatgtcatttgccccctctgaagaggtacatctaactgccattagaatatggatgatgaccagtcttagctgcttcctgctgaaagggggcattgttttgggggaaaacggcagtcagattcctcccaggggtctctataataaaagatcgaggtggctactttcaggaggtcctctaatgtactatctggtcccaagtcccatttctgcaacctcctcctgatgtcaggagctgcctgagtaataattttatcctttaggattatctgtccctcgattgaattaggagatagagaggtgtgatttaccaaggcctctcttagcctctccaggaaggcagtgggattttcatcaaatccctggttaattatggacaacttagtataattgagaggcttggtcttagacctacgtaagccctctattatgcacacctgaaagtgtctcctcttccagtcttccatctcattattgggatcccatttagggtccttcactggtgctacttctcttccagttggataatattcgctcccttccctgatgctataggtgatgcaaagctcatccccaaatctctctgctgctggcagagcagcctgcttctcagtgtctatcaggttctgactcaaaagtaacataacgtctctccaggagagttcaaatgttagggtgaaattctggaaagcttctatatatctatcagggtcatctgaacacttgcccagatctcccttaatttgctttaagtcttgtagggaaaagaggacttggaccttactgggcccaaattcactgggcatctgtaggaggggcaagagtgagactgggcttgtttgggatgaagatttctaggaggggccaggtgagaggctgaagctggatacggaggttggggtggacccagaggagcagggcttgagggagctggcacgtcagctgggggtgcgtctgggactcgtgtctttaattccctgggcttgaccctggcagccttccccgagacagcaaacaggagggctggaacaatcctacatgtcagcaaaggtctggattgctttgcaaggtatagaaagcctgcacatttggggcctcagaccatgtgtcctcacatccagagaaaagttctaattgcaggatggtattgaaatgaatggtcccttcctgaagccaagccagtccttcctgtaaaccataatttggccaaacctatgtgcggagggctatgagatgcttttcctctggattctgagggtcaaaacagtcccaatggttcaggatacactcaaggggagtacaagctgggggtggtgaggagaactggctgcccattctgaaagacagggaatagaggtgttcctcatttcccttccttcttttggcaaaaagctcagggtgtgatggggagggaaagcaagcatcttcacttcactttccacctcttacccctgcgccctggcaaccttggcaggtgccggccacaggtacaaatgcggtatgtacccatgaagcagggagaacctggagattaggaattaactgccctcacctatgtttccttttctccctgctgttgaaaaactttgagttccctgggcctttttatcccatgaggcatggcctccttctgtgggatggggttcagtcagcaggaattggtcctgtccatttacattgtgcctgttgcctggctttgaattcctcagacctgctttctctttctagggcctcagcctgaagcttggaattgagtttgggactgaaaaagcatttcagaggctgtttatatccatttagtgcctcaaataagccctgctgaatttgcaattatcagccagcaggggtcactcctctgttaacttccctattagaaacagagcggtggggattctcacttagaaaagaaaaaaagagaaaaacagttaaagaggcaaaaagtggggaatgctgggggaagaaccccttgcttagtgcaagtgggcccctctaatccttataactttcccatccttcccccagttcagaccaggttgaattccttggccatggaaggaaaggttccattgatgcagtgggtgagaagcactctgtagggtcctggctaccatcggttttctcacacccccctcatcccaggcagtggagggagacacttctgcgacattgctccccctgccccttcatggctattgggtgtggcctttgcctgctgcaggcatgcctaggtgctggagctgggagggaaaagggtaaggagaggtgccctggaagccgctcatgcctggggctgtcaaggtggaggcatacatggcacctctaggaaaaattggtctgatttgcacctttggcggctgagccaaatgctcattttacttagtaacattgcctcagcctgtagcaaaactcttaacattataaaggaagagataagatccatttcaaataatgtgtgagagagaaaagagatgaaaggaaaacagagtcttttacctgcaggaaagggagagaagtggcagagttttggaagaaaggcaggcccaacagtttcccattcactcacactcaccttccgagatcccagacgagccaccagttgaaatgggaaaagtttccttgtccccctcacaggaggtggagtgggggtgtggcttgcttctttagtactccgctgctcaaacctctagggaagcatacagactggcaagttgtggggctacaaccccatggcagcatctaggggtagatgtttacagctgctgaagccccagtggacatgtggtaccatgtgctcttttagttttgccatctataggtggctttgtggtaaccagctcaattagacccattccttaacccaaagacagagggctttctgtatcccgcggttgttacctaggtgtaccagaaaaatcaaatcacacgtggtcttggagaatgagtgcaaggttttattgagtggaagtagctctcagcagatgggggagccaaaagggagaatagttttcccctgaagtcgggttattcagcggcccaggctctcctctggctgccccagccaaactctatgtcaatccattggtcggtggcctgccagagtgctggtgcctgttggtggattcctctcagcgtcgagagtttttccctctcaggaaagggagagaagtggcagccacccatgtgttcttgcactgatgtgctcctctcgacgtccaacctcctgtgtgtctgcctgctagggtcccagagtttttttaggcacaggatagggcatggtgggccagggtgatcttgggaaatgcaacatttggtcaggaaaacaaaaatgcctgtcctcatctaggtccaggggcacaagcccaggtttggagccctagccagggaccccggcctcctctacccatcactttccttcaccttttctgtatcattcaaagggaccatgcccttcccttcccagcacttctcttctgtatcaataggtgatgtttttaaaatttcccaactctagtgcaggcatggtactagacatatacatagaaataaaaccacacttattcttctggctggcaagacatagtatttttgccaaattatgtgttgttttgaagcattttatgtacccctggtcatataaaaataaagctattttgttcagtacaaacagcagcattttctggattagaaagttaatcatcttaaaagatcatcacggatttttccattgcactcatcactaattgctttggcaaaaaatttcttatctcacgcatgacaaaatcagccgcagtatctcctagtaatttaatggtgatgatctttataaaggaaataagcacatcaagggaaaacataattttttttaaaaaaagagtaataaaactttttaaaagtcttttttaaaagactgcttttctaaaatagtaaaataaaactccaccaataaaaccaccaacaaaacagaaaagaaaaaataatgatatgatcggagctatttgatgaaagatggtaaattaaatttaaaatgattagaagagaaaaagcaatacctgtctcccgtaggtctcagtccaggttctgctatgcctttctcctggtgagccacctatttaagagtcgcttaaagcatatgttaatccaacaacagcagattaaaaaccaatgcaatctgaactatttgatctaaaaacataaataaaatttaaaacaaataaaagagaaaaagcagtacctgtgtcctgtaggtctcagtccaagatctgctctgactcccttgtggtgagttagccctttagaagtcacttggggtggggcatatgttaattccactaacattggttctggccaatgagtcaggaaggtggtaaatggcaccttttcttcttgctgatttctttcagttcctttggagtctggacattagtcctttgtcagatgcctagtttgtgactactgtttcctatactgtgggttgtgtgtttaccctgctgatatttcttctgccttgcagaagattttcggtttcattaggtcctattgatcttattctatttttatatttttgcgtttgcttttggggcattagtcatgactacttggcctaagccaatgtctagaaaagctttttggatgctatcttgtagcatttttagactttcaggtcttagatggaagtttttatatgctttgttaaagatcaggtgactgaaagtaccgggctttgtttctcggttctctattctgttccattgctctatgtgcctatttttatacttcctgcaccatttattgaataaagtgtcctttccccaattagtgtttttgcatactttgttgaagattagttgtctgtaagcatttggctttatttctgggttctctattctgttccattgctctatgtgcctatttttatacttcctgcaccatttattgaataaagtatcctttccccaattaatgtttttgtgtactttgttgaagattagttgtctgtaagcatttggctttatttctgggttctctattctgttctattgctctatgtgcatattttataccagtatcatgctattttggtgattgtagccttgtagtataatttaaagcctgccttcagatttgttctttttgcaaagtattgctttggatatgcggtcacgtttttggttttgtataaattttaggattcttttttctagttctgggaaggagaatgatgatattttgatgagaattctactgctctgtagatggctttggagagtatggtcactttcacaatattgattctacctattcataagcttataatgtgttcccatttgtttgtgtcaactgtgatttctttcagcactattttgtagttttccttgtaggaaacttacattaacctacttggttaagtatatttctaagtattttacttattaaaaattctcagggaaatgcaaagtaaaactgaggtgggaaattaaagaaaaataaaattaaaaagaaagggaaataagctttcttgtattaagctaacttgtcccagaggcagcaacaggcacagcccagacccaggaaaagtcttgataatattatttattgtattctggagactcttccagcactccttcaatgtagggagaagaaaaacaaattttcctttgttttatggtatgagtttatagattcttgttctctttaactagtaacttcaagtattctgttttatctaagaagtatggcaaaggtcatgagaagcctgagcaggcctgaactacagctctctaggcaccatagtgaagataaaccaatgcaagcctctttagagcaaaacctagataatagacatctgggttgcatagcaacagttatgtgcaatcctgagttatgaacctgttacaatttgattaactgtctttttcctgcctctgtatccctgctttcacaccactgtaagcttgcttcaagctggcccacccccttttgtgaagtgtgtataaaagtcaagtgctgtctttgttccaggccctgtctttggacgtgagtctgctgggcctgagagcactcaataaaagattctcctgttttaacccaaagcctctctctcatcctcctaaatcccacaacaaaaccacaatgagatgctatcttaatcttgctagaagcccataatttaaaagtcagaaaacaatagatgttggcatagatgtggtcaaaagggagcactttgacactgctagtgggaatttaaactagtccgaccactatggtaaacagtatggggattccttaaagaactaaaagtagaccattcattccagcaatcccattactggctatctacccaaaggaaaagaagttattccataaaaaagacacaagaatatggatgtttatagcagccgattcgcaattgcagtgatatgggaccaacttaagtgcccatcaacgaacgagtggataaagcaaatgtggtacaccatggaataatacttgataataaaaaggaacaaaataatgtcctttgcaacaagttggatggaactggaagccattattctaagtgaagtaactgaggaatggcaaatcaaatattgaatgttttcacttttaaatgagagttaagctatgagaatgcaaaggcataagaatgatataatggacttggggactcagggggaaaggttgggagggggatgaggaataaatgatgacatattgggtatattatacactgctcaggagacagatgcctcaaaatctcagaaattaccactaaggaacttttatccacataaccaaaaaccacatatattccacacactattgaaagaaacataaacattattttaaaaaataaagccacttttaaaattagcaaaataaaataaatatgtcttcagagtttagatattggatccaaattagacagatcaaatactgcctttactaaatattttcatgtcattaacaacttctaaaacctttcaaacagttttttgacatgtcttggaaccatccatttctagctaaggcctgggcacctgtgaaatagggccatgcccccccttatactgggaagagtaagatatttcaagactaagatgttttctacagctccatctttttctttaagctctacatcaaggacataattaaaattggttgtctcctaagtggtttactaaaaatgcatacttaagagttaccattataattaatatttgtatctaaagctacttaaaaattttcacacacaaatctgactgaacaagtaaaatatattttaagtcaaagtttataaaaggacatgagaacatagcttttatgaaaaaattagttttgtcaagtttagaggttttcaaatattttaaattcaggaaataaaataacaaaaagacaaaagaaaatggttgaacaacttagaaaaggtttgttaaaattcatcttataaaacaatctacatgtaaaaagtgggctaaaatttgaaagagattatttaggttttccataaattaatccagaaggggtaggaagtcttaagaatgaggaaggacaggaggaaggggaggtcatcctgacactgcagaggcagaagtgcagctgaaggtatgaaggctaagaggggaggggagtttgagtgctgctgcctggctgtcagagcagaggagggtcctgggcaccagacttgaggaagggatgaaaatgctgggcagacctgtagtgggcccttgagatggcagatagtggtttccagagagagggccattgttttccagtgcccagcactgagcagagagagttttgggcagtgtaaaaaaaaaaagagaacttacctctttctcgttttagaaaaagaacagtctaagaatatcagcagggaaactctcagtgcttcaaggggttaaacgcccttttggctttcttgtgttggtttcatcatagaggaggagaaacttcttggaagtgttcctaaaaacacaacacgtctgcttctcctttcaaaaaaggaagtgctaaaacacgaacactctagatccaaatattaatacggatgtctaaatgcttccgttttccaaggggcagaaagctaaaggttgtaacctattcatttcagtcaaagttggtgaaagggaagcaaaggaactgggtggggcttggaaggatgacgaagctcaagctcattggccagcaacctctctcctgggggcgggaggggtgagcatacgtcattgctttggcttctataaaatgaggaggactcaccgagtgtgaagagtccttctggtgattgcagctgagagcacactcacgacgttctgcaaggattctctgattatgattctgaagggaaaagcgatggaatggacagcagagattgtaattttctttatcttgaattacggaagaaagtatctaggacagaaatccacgacaagtccttggaaccagcagatctcttcgttcacggagacgttgacgtattctctattgaagaagattcttaccttcttactggacaaggttttgtcagttctgcgtgactggattgtccgggagactctgaggaaactgatgtcacatgtttttccaaagaagatgtttctggaaccaacaactgtgattgtggtttgaggacttctgagagttccagtacaggaaataagcagaacatcagctggaggctaaacggatccagacttcactcttcacttcccttcctattcagtctattgtgcctgctgactgagaagcttggctggtatgtgagcaaataaacggaactattcagaaggagatgttgacatattctgtattgaagaagatccttatcttctcacctgacaaggttttgtcagttctgtgtgactggattgtccggaagactctgaggaaactgatgtcacatgtttttccaaagaagatgtttctggaaccaacaactgtgattgtggtttgaggacgcctgggagttccggtatgcgaaataagcagaacatcagctggcggctgaagggatgcagcctccactcttcacttcccttgccattccatctattgtgtctgcctgactgagaagcttggctggtatgtgaggaaataaacggaattataaacaaggagattgtttctcatctacttcattctgttgtggcttttctattttggggttcagggtgtgtgacaaggaccaaggagatgaaaggtttcatgatggagaaagcccaggcaatcagattgaagagctatccacagggaatcttggctgctgaggggctgcaccctgcaacggactgaccatatgacagaaaagggttttaaaggctcaacttctggactgagaacccagagtaatttgggaacctcctctgtgaggagatatgaaagctgggaatcatgacatccctaggaatggaaggcacatttcctgatggaaggggtgctttggaaaacaggagcagagtagacacagcagccttgtggatacgggtgggcagcatgcatgggtgatgtgaacgtggagtgtttgtgatcgaaactcaaaatgtctgacaaagtgaaaacctagaaaccacaatgaggaggaagagtttgtgagggcaatcactctccccatgtgtgaaaatcgggggctcttaaaatctcatctggagaggtgcagtctaccaaactctgggactttagcctccccttttaaaaaaccgtgcatcaataccaacgtccgaaaccacagaaataacacctggcttgcatggagacaaggacaaaaagccgtcatgatgagttgttctgctcacttgctgcctctgttcagtgcacaggatattgtccacccactagcaggctactgcaagagaagtgtgcaatatgttccctatgtgccatatatgtgccatatggcccatatgacaactgagtcagaaaatatctgatgccctcagagttacactccacctggagcttgcccccagccatccaggacctaggctccctaccctgtccaattttctggtgttttgggggcttcattctctaaggtgtgcccactctttactcaaaccaaaacacccacatattcctgcccatgaacaaccaatcaaccacttctcagttccacatcctgctgttgggtctctagtggtgacactgtaactcccaggtcatagtggtgacactataacacctagctaaattgatgccttgtctctaggaggccatgggctcctgcaggtctcatctgactctctgtagccttccctgacaatgctcacaatacccaagccagagccacattgacagcaagctgctctcatcttacctttgccagacctggccactggaaaaggctgaccctcatcctgcaatgcctatacctccaacctttgtctcaagctggtgtcctggagggacttctaagcagaaaacagattcagactcccatcctctcctgaatggcctcatatccaattctcagaccctcagccttcattgtaaggacacttcatccatgcccttgagtattctgtctgcactgtgtattctgcaatagattctcctccctctgcgaccctcaactccttccgcagactttttgttttcttgatcatctaccatagtcttccactgggacactgccaagcccattctggagagtgagttgtgcaagtacactgccccccatctacctttcgggaggtgtatacacccttctttctcccaggtctggaggctttctattttcatcctgaggcatctccacctgctcttggattcttcaaattgacaaccaccagttaacaagaactatgtgtcaccaaatagccaaacaatggcaattacaaaaataaaattaatagctgtaacccccattagcaaggatacacaaatcaaatcagggatagtgggtgaggaagtctgcctaacattcaaggaaggattctgaagtgatacaaaatcattgcctttgctatctttagaatggacactttcagccaggcacagttgctcagcctgtaatcccagcactctgagagccccagttgggtggatcacttgaggccagcagcttgagaccaccctgggcaatgtgcagaaaccccaactctactaaaaatacaaaaatagccagttattgtggcacatgcctgtaatcccaactccttgggaggctgaggcacaagaatcacttgaatctgggagccagagtttgtaatgagcgaagatcatgccactgcactctagcctaggcattagagtgataatctgtctgtggaaaataaaaacattcctcttcaaagttttcttctttaaatcataaatgttggaattaatatatcctctttgaaactcactttcttcaagcttctttatttgatggtagtaaatctttgttaagctttatgaggcaagagtaatggaagaagcatattatatatatttatactctaacctcagtgcttgttctagcaagctcaggcatgcgtgaatgtgcccaggcatgttccagcccataccttatatcctttccttattgggaaatgctgttactcctataagcattcttgtaagcaacttcctctttttctttgtctccactatctttacctattgaggacagttttaggttcttagccagttggatgtagcatagactgtgaggtccaaccccagccaatggagatagcacacagcagtagcgacctcatgcttaacagataaatattcctgtctccctttgtttggggtgctctcagctgatgagcaacaccctttctaaagaaattaaagttgtcttgctgagaaaacttttggtctaaatgctgattcttccttgcagcactgaagaagaagcaattatttccaacactttctcatacacaaaaaaagaagaaggtggaagaaaactttcttgtgcaccctatccctcactcagaaagacaacagaaggctcctagtggcaagccctagaggattcatttcttttgggaaccctcttggctgggatactaggactcaggtcaaactcagcattttcagtgtgtgggaagtgtgcttgggtttcactgttacttccaataatgtgatttggtccttggggttcaccaaattttggtatggagtggtgaaccctgttaagtttaagtgtctataaaattaacaaagcaaaataaccattctgccccatggttcagagaccaaatattgtgtaggaaatgctttagcgagagaaacagagaagaataaaaaatgtcctcaagcgctgcattatttcttgttatcgtccagatcttagaggaaaggctttcattttccctcattcagtatgatattagctgtgcatctgtcatttatggcttttattatgttggggtatgttccctgtgtatgtagttttttcagggtttttgttatgaagtgatgttgaactttatcaaacgtttttcagtttcagttgaaacgatcatatgctttttgtccttcattctcttgatatgatgcatcatgttgatgatttccatatggtgcactgtccttgcatcctgggcatgaattccacttgatcatgacaaatgaatttttaatgcattcttgaattccgtttgctggtattttgttgaggatttttgcatcaatattcatcagagatattggcctgcagtttctttttttttcttttttctttgttttgttgtttgtttgtttgtttgttttgatgtgtctatgtctggttttggtatctgggtagtagtgttccatccccttttattttttagaataatttgaataagactggtgttggttctttaaatatttggtagaattccgaagtgaagtcattgggccccgggcttttctttagtggaaggctgtttattatggcttcaatctcgttacttattattggtctattcatgttttgaatttgttccttatttaatcttggtaggctgtgtgtatctaggaatttgtccatttcttttagattttcaaatttattggcacataattgcccattgtagcctctaatcgtcatttgagttcctgcagtaccaattataatgtctccttcttcatttttgattgtatttatttggatcctgcccctttttttcttacttaggctgcctaataatttcttaattttgttgaactttttcttttgtttgtctcgctctgccaccaggctggagtgtagtggtgtgatcttggctcactggaacctccgtctcccaggttcaagcaattctcctgcctcaccctcccaaatagctgggactacaggcaagtgccaccactcccagctaatttttgtatttttagtagacacgggttttcaccatgttggccaggatggtctcgatctcttgacttcataatccacctgcctcagcctcccaaagtgctgggattacaggcatgagccactgcgcccagcctaattttgtttaaattttcaagaaatcaacttcttctttcattgatttctgtattttttatttccattttatttatttaaactctaagctttattctatcttcttctcattttagctttggtatgcttattgcctctctagctctttaatgtgcattgttagattgtttatttgaagttcttcctctctacaccataagacgtaagcatgtcctcattatgtcataagatgtaaccacttacagctataaacttccttcttagttctgcttttgctgtatctcataggctttgttatgttgtgtttccattatcaattgtgtcagaaatttttcaatatttttcttaatttcttcattgagcaactgatcatttgggagcatatttttaaacttccatgtacttacatagtttccaaaatacctcttgtgatcaatttctagttttattccactatggttcaagaagatgcttgatattatttcaattttttttcacattttaagatgtgttttgtgacctaacatatggtctactttttttttttattaaactttaagttgtggggtacatgtgtagaccgtgcagttttgttacataggtatacacgtgccatggtggtttgctgctcccattaacctgtcatctacattaggtacttctcataatgctatccctcccctaacctccaccctctgacaggacctggtgtgtgatgttcccctccctgtgtccatgtgatctatttttgagaatgatccatgtggattagaatgctgtggaaaagactttggattcctaatatccagggagggagacgatgatattactttcaatatcacacgggtgtacacactctctgtgacattgttcctaatatccagtggaagagaggatgatataacacccagggagggagaggatgatattactcttaatattgcagggtgtgtacccatgcctatgatattgttcctaatatcaggagggggagaggatgatattactcagaatatggcagggggtgtacacacactctgtgacatggttcttaatatacaggggagaatgggacaatattactctcaatatcgcagggggcgtacaaccctgtgatttgttcctaatatacaaaaggggacagtatgatattgttcctaaaatcgcagaaggtgtacaacgccctgtgatattgttcctaatatccagggcgggagaggatgatattacccccaatatcacagggggtgtgcactttccctgttacattgttcctatgatccgagtggggggaaatgacattagtcccaatatcgcaggatgtgtacactactcccccatgatattgttcctaatatcaagggggagagaggaggatattactcccaatatcgcaagggaggtacatcctccatgcaatattgttcgtaatattcaggaggagagaggaagatattactctcaatatcgcagaaagtggacacccaccctgtgatgttcttcataatatccagggaagcagacgattatatgactttcaatatcgctgggagtgtacatcccttttgggatattgtttctaatatccaggaagggagaggattatattacttccagtattgcagccagtgtacacatttcttgtgatattgttcctaatatccagaaagggaaaggatgatattactcccaatattgcaggtggtgtacacccccctctgatattgttccttacatcaaggaaaagaaagaagaatattactcccaatatcgaagagagtgtacacccctcctgtgatattgtatttaatatccatggggaaagaggatgttgttactcccaatatcgcagggggtttacacccacactgtgatattgttcctaaaatccagtgaaggagaaaataatattgctcccaatattgcagggtgtatacaggccctcccccgttatattgctcctaatatccagcggtggagaggatattactttcaatttttgcagggagtgtgtaccccctctctgatatttttctaatatcaaggatgggaaaggatgccattactcccaatatcgcaggaggtgtacatgccctgtgatattgttcctaatatccagggaggtagaggatgatattactttcaatattgcaggggctgtacaccctctatgatgttgttattaatatttaggttgggagaaaatgatatttttcctaatatcctgggaaggaaaggatgatattactgtaaatattccagggagtgtacaccttcctaatattctaatattgttcctaatatccaggggtgggagaggattatattactcccaatatcgcagtgggtgtacacccctcctgtgatgttgtttctaatatccaagcgaggagaaaatgatatcactctcaataccgcagggggtgtacaccttccccatcatatcgttcctaatattcagagggaaagaagatgatgttactttcaatatcgcaggggttgtacacaacccctgtgatatttctcctaatatccaggaagaaagaggatgatattgctcccattatagcagacggtatacgcctccctgtaacattgtttctaatatcaagactgggagaggatgatatcacttccagtatcgcaaggggtgtacacctcccccgtgatattgttactaatatccagggggaagaggataatattactttcaatattgcaggggctgtacacccccgtgatattgttgttaatatttaggttgggagaaaatgatattagtccaaatatcgcagagagtgtacacacttccgataatattgttcttaatatccatgggggagacgatgatattacacccaatatcgcagggggtgtagtctccccttgtgatattgtccctaatattcagggaagtaaacgatgatgttagtgtgaatattccagggagtgtacaccccctttgtgatattgtcctaatatccgcaggagagaagataatattactcccaatatcgcagggggtgaacacaccccctgtgatattgtttctaatatccaagcgaggagaaaataatattactcccaatgtctcaggggatatacaccttccctatgatattgtttctaatattcaggtggaaaacgggtgatattactcctaatatccaggaagaaaggggattatgttactccccttatagcagggggtatacacctcccctgtaatattgttcctaatatcaaggctgggatatacgtggggggaaggatgatattactcccaatatcacaggggttataaaaccttctgtgatattgctcctaataaccatggcggaagaagatgatattactcctaatattgcaggaggtgtacactcccccattatgttgttcctagtatgcagaaaaggagaggatgacattattgccaatatcgcagggtgtgtacaccacccatgatattgttcctaatatttagagggacagaggatgatattactcccaatatcgcagggggtgtacacgcatcccctgtgatattgttcttgaaatcgaggggaaagagaattatatttctctaaatattgcagagggtgtacaccgccccctgtgatattgttcctaatagccgggggcggggggagataattaaattactttcaatatctcagagagtgtacatcccccttgtgacattgttcctaatatccagagcaaaagagaatgatattcctcccagtatcgcaggaagtgtacatttaacctgtaatattgtttctaatatccagggggaagagaatagtaatactcccaatatcgtaggggttgtacaccttttctgtgatattgttgcaaatatttagaagagagagagaatattactcgcaatatcacagggaatgtatacttcccctgtgatattgttctaatatctagaaaaagagaggataatattactcctaatattgcagggggtgtacacccccacttgtgatattgttcctaatataaaggaaggtcgaaaaacaaacggggagcccagggggaaggaaggcaggcgaggaagaggcagcgccggggcgccggagggagcagccgggccgcggaagcgcgagcacgagaccggtcgcggtcgcagtcgcatttttgccgttgtcgcggccgccgccgccgaggcttacccggggatgtctgagcccgcgcctcgcggcccccaagctccacgctgcgcccgctgtcccggcctctaagggccgccacgtccctgcggcgcgcgcaggcagaaagcggcttcgtgccggcggagggggcccgggcgggccgggaaaggctgccccaggccccgcgcctaccccatcaccgcggccggcgccgggccgggaggatgagcggtgtggggctctgaagcatggagggggttttgtacaagtggaccaactatctcacaggttggcagcctcgttggtttgttttagataatggaatcttatcctattatgattcacaagatgatgtttgcaaagggagcaaaggaagcataaagatggcagtttgtgaaattaaaggtgacagctttggaggggaccacccttgattggatacataaattctgttcattcagcagacaacacaagaatggaattaatcattcctggagagcagcatttctacatgaaggcagtgaacgcagctgaaagacagaggtggctggtcgctctggggagctccaaagcatgtttgactgatacaaggactaaaaacgaaaaagaaagaagtgaaaccagtgaatcgctgaaaaccaaaatgtctgaacttcgcctctactgtgacctcttaatgcagcaagttcatacgatacaggaatttgttcaccacgatgagaatcattcatctcctagtgcagagaacatcaatgaagcctcttctctgcttagtgccacgtgtaacacgttcatcacaacgcttgaggaatgtgtgaagatagccaatgccaggtttaaacctgagatgtttcaacggcaccatccggatcccttagtttctcctgtgtcaccttctcctgttcaaatgaggaagcgttctgtcagccaccctggttcttgcaccagggaggagtagccactgtataaaagaaccagtatctgcacttcaccgactctcccagcgacgccgaagaacctactcagatacagattcttgtagtgatattcctcttgaagacccagatagacctgttcactgttcaaaaaatacacttaatggagatttggcatcagcaaccattcctgaagaaagcagacttatggccaaaaaacaatctgaatcagaagatactcttccatccttctcttcctgaagaaactgtagtgtccaactttctctaagtattgctatgcaaaagctgctgtaattgaactattgttatagggagtagttttttcccttaggactctgcactttatagaatattgtaaaacagacaaacaagaaaacaaaccacatacttttgaagcgtgttttatctttatatagtttgtttgcaagagtattttcctaataacttcacagtatgaatgtgcatcttttttttctttttttaacaaatgatggtgtaacattttgacatccataaggacaaatgtagatatttttctaaaaaaccgtgaggggactgacagcttggtcagggtgtattgtagcttataaacatgaaatcttacaaggtttcagtttgacagaagtgtgatatatgtaacttgtgccatggaccaaatggtcactttaccacagctaaaaatgagttatgatagcagcttgatggtgattgcattgtattcctttaatcaaaaaggaaacgcaatattctaagtatctttagcccaaataccatgacatattgagcatctttaaataaccagactgtattgtccttcatatgtgaagttgacactactgatttgtcaataccaaattttgggttaaagtgtttaatttttatttatttattttcttgttgcctcaaaagatgattgcattctaacttttgtgacctaccaaatttaagatgtgtatacattgttctttacgttgttctagaaaagagattttaatgctgtagtgacttagctcacttacatcagagaaataaacaactttcaatggaaaaaaatatatataaaggaaggaagaggatgatattacttctcatatagaaggggttgtacaccccccttgtgatattgttcctaatattcagggagggagaggattatattactcccaatatagcagggagtgtacacccccccccccgtgataatgttcctaatattcagggaagcagaggatgatattactttcaatatcacagggggtgtgctgtccccctgttatattgttcttaatattcaggggggagaggatattattatgcccgatatcacaggagaagtacaccccacaagtgatattgttcctaatatccaggggtaaagaggatgatatcgcaggtggtgtacacccctccccgtgatattgtttctaatataaagaaggagagagcatgatattactcccaatatcgctggaggtctacaccccccttgtgatactgttcctaatatccaggaagggaaacaatgatattgctgtgaatattccagggggtgtacacccctttgtaatattgttcctcatatccagggggtagagaggatgatattactcccaatatcgcagggggtgcacggccccactgtgatattgtttttcatatccaggaggggagaggatgacattactctcaatatggcagggggcgaacaccccctgtgatattgtgctagttaggttgggagaaaatgatattactcccaatatcgcagggggtgtacaccgctcctgtgatattgttcctaatatccatgacgggagaggatattactcccaatatcgcagggggtgtacctctcccctgtgggattgttcacagtatccaaaagggaagaggatgatgttactcccaatatcacagggagtgtacaccaccattgtgatattgttcctaatagccagggaagaaaacgatgatattattgtgaatattacagggggtgtacacaccccctgtgatatggtttttaatatacaggttggaaaaggatgatattactcccaatatcacaaaaggtgtacacacccccccatgatattgttcttaatacttcggtggggagaaaatgatattagtctccatatcacaggggtgtgaactcctccggtgatattgtttttaatatcaagaggggaggagatgatattgctttcaatatcgctgggggtgtacatccctcctgtgatattgttccttatatccaggcgaggggaaaataatattactcccaatagtacacaccccatgtggtattgttcctaatactcagggggaaagaagataatattactttcaatatcacagggtttgtacacctttcctgtggtatagttttcaatatccagggggaaggtacatgatattactcccattgcagcaaggggtgtacacacctcctgtgatattgttcctaatatccagaagtggtgaggatgatattactcccagggggtgtacaccccacctatgatattgtttctaatatccaggggaaaagagtgtgatattatgcccaatatcgcagagggtgtacacttatcctgggatattgtttctagtatttggggagggaggagaggatgctattattctcaatatcgcagaaattgtacacccccgctgtgatattcttcataataatcagggaaaaagaggatgatattactaccaatattgcagggggttacacttcccctttggtagtgttcctaatatccaggaagaaagaggatgatattaatcccattttccaggaagtgtacacccaccgtgtcatgttgttcctaatatccagcagggaagaggatgatattactcccaatatcggagagggtgtacacttcccctgttatattgtttctaatacccagggggaagaaggatgacattactgccaatatcacagggtgtgtaccccaccctgctattgttcctaatattcaaaaggaaagatgaaaatattactcccaatatctcagggtgtgtacacctctcctgtgatatcgttcctaatatccacaggaagagagaatattactctcaatattgcaggggggtgtacacccccctgtgatattgttccaaatattcgggcggggagaggatgatattagtcccaatatcgcagggggtgtgcaccaacctgtgatattgttcctaatatccatgcgggggaggacgatatcactctcaatgtcgcaggaagtgtacacctctcttgttatatttttcttaatatccaggagggaaaagatgatattactgccaatatcgcagggtgtgtccaccccccttttatattgttcctaatatccaatggaaaagaggatgacattgctctccatatcccagaaggtgtacaacgcccctgtaatattgttcctaatattttgggggaagagaggatgatataacttataatatcacaggaggtgtacaccacccctatgtattgttcctaatatcctttaagggagaggatgatattactcccaatatctcaggtggtgcctattccccctgtgatattgtttttaatatccaggggaagagagtatgatattacgcccaatatcgcagggggcatacaccctctctgagatattgttcataatatatagagggagagaggatgatattacttccaatatcagaggtggggtacaccccccggttatattattcttgatatccaggaggggagaggttgatattactggatatatagcagggagtgttcacatcttctgtgatactgttcctaatatccagaaaagtagaggatgatattactcccaatatcgcagaacgtgtacacctccctgtgatattgatcctaacattcaaaggggagaggatgatattactcaaaacatcacagggcatgtacactcccctgtgatattgttcctagtatccagaagggagcaagataatattactttcaatatcgcagggggtgtacacccctctttggtatgtttcctaatatccagaaggaaagagggtgctattactttccatattgcaaggggtgtacacccccctgtggtatggttcataatatccagggagggaaagggtgctattattccccatatcgcgaggcatgtacaccctgctgcggtacggttcctaatatccagggggaaagaggatgctattacttcccatatcgcggggtgtgtacacccccgtgtggtatgttttgtaatctccgggaacgaagagggtgttattacccctcatatcgctggaaatgtacactcccctgtggtacggttcacaatatccaggggattgagggtgctattactccccatatcgcggggggagtgcacctccctgtggtatggttcgaaatatccagggtaagagagggtgctattattccccattttgcaggaggcgtacacccctctatggtatgttttgtaatatcccaggtaaggggtgctattgagagaagagagcaaaagaccccccccatattgttctgtattattttatactcagtacctgttttaagaagaaacaaggaagcgaaaccaaaggcaggcagcccggcgccaggcaccagatccaaaaccagacccgaaaccaggcctgggccttcctgaccttagcctgaaagttaaaattcaacccatgacctagcaactgatgttatccatagattccagacattgtatggaaggacattgtgaaatttcttgttctgttctgtttcactctgagtactggtgcatgcagcccttgtcacatacccactagattgctcaatcaatcatggccctttcatgtaaaaaccttagtgttgtgagcccttaaaaaggacagaaattgtgcactcaacaagcttggattttgatactctagtctgctgatgcttccagctgattaaaagccacttccttcactacctcggtgtctgtgggattttgtccgcggctcctcctgctacactgtgactccccttatagagaggggtgtacacccccctttggttcctaatatccagcgggggagtaggtgctattactccccatattgcggggagtgtacacccccttgtagtacggatcgtaaaatcaaggagggagagaaggtgtaattatccccatatcacagggagtgtacacccctttgtggtatagtttgtaatatccacgacgggagagaatgctattactccccatatcgtggagggtgtacaccgccctgtagtatggttcgtaatatccggaaggggagaggttgctattactccccatatggtgggaagtgtacacccccatgtgatatggttcataatatccaggggggtagaggatgatattacccacaatatcatagaaggtgcacacccttttgtgatattgtccataaaatccagaaggggagaggatgatattacttccaatatcacagggggtgtgtagccccatatgatattgtttgtaatatcaaggtagggagaggatgctattccttacaatagctcaaggggtgtaaccttcttgtgatattgtttgtaatatccagaaggggagaagataatttttttattttaaaagtaaactttaatgtcaaaaatgcaaacttgagaagggcagaaagatcaaacagaaggctgccacttcacaattggagggttgcacagtggccgggcagaggcgctcctcactccccagacggtgaggcagccgggcagaggtgctcctcacttccgagatgttgcaggagccgggcagaggtgctcctcacttcccagaacagggggctgccgggcagaggtgctcctcactgcccagacggtttgcaggcctggcagaggcactcctcacttcccaaacggagcagcggcaagccagaggcgctccacacttcccagatggtggggcagccgggcagaggcgatcctcacttctcagagggtagggcggcccagcagaggcgctcctcacttcccacatggtggggcggcaggctagaggcgatcctcacttcccagacggtggtgtggccatgcagaggtgctcctcacttcccagatggtgtggccgccgagctgaggcactcctcacttccctgacagtggggcggctgggcagaggcgctcctcacttcccagacacttggactccgggcagagactctcctcatttcccagatggtggggctgccgggcagaggcgctcctcacttcccagacggttcagaggccgggcagaggcgctctggggagaggataatgttactcccaatatcgcagggggtgcacactccctgtgatattgttccgaatatccagagggggaaaggatgatatagctcccaaaatcgtggggagtgtacacccccctgtgatcttgtttgtaataccaagaagaaaagagaatgctattatttccaatatagcagggggagtacaaccccctgtgatattgttcgtaatatctagggggagagaaaattatattagtcttaatatctcaggggacgttcatccccctgtaatattgttggtaatattcagaatggagaagatgatattgttcttaaaatacaggaaaaaatatgataatattacttccaatatcgaagggggtgtacactctcctgtgatattgttcccaatatccagaatgaaagaggatgctattactcccaatatcccagggagtgtacacccctttgccatattgttcataatatccaggggaagacaggataacattactcccaatatcaccgggggtgtccacccactagtgatatttattgttcatcatatccagaaaaggagaggatgatattactcccaatattgcaggtggtgtacggtccctgtgatattctttgaaatatctagaaaaggagaggatgatatcactccgagtatcacagggggtgtacacccccctgtgatattgttcgtaatatccaggggagaaaaggatgatataattgccaatatttcaggggatgtgcacctccctgtgatattgtttgtaatatccaggggtggagaggatgatattactcaaaataacgtaaacatcctgtgtgtacatcccctgtgatattgtttataatatccaggggggtagaagatgacattacccccaatatcacagagtgtacacacccctgggatactgttcataatatccaggcgggaaagaatgaactacttccaatatcgcaggatatgtacacccccctgtgatatatttcctaatatttatgtgggtaaggatattacccccaatatcacagaaggtgtacatcctctttgtgatattattcctaacatccaggaaaggagagaatgatattactcccagtatcgcagggggtgtacaccacccctgtgatattgttgctaatatccagggggagaggataatattactcccaaaatcacaggggacgtacactcctcctgagatattgttcctaatattcatggggaaaagaatgctactactccaaatacagcagagggtgtacaccatccccgtgatattgttttttatatccaaagggtgaaaggctgatattactcccaatatcgcagggggtgtacaggccccccatgatatcattcttaatatccagggaggcaaagaatgatgttactcccaatattgcaggctgtatacaccccccgtgatattgttcctaatatccagagtaagagaggatgacattgctcccaatattgcaggggttgcacgcacgccctgtgataatattactcccaatatcaacagtgggtgtacactcctcctgtgatattgtttgttatatctaagaaagaagaggatgatattactgtcaatatcacagaaggtgtacagccccttgtgatgttgtttctaatatccagcggtgagaggatggtattactcgcaatattgtagggggtgtccaacggccctgtgatattgtttctcatattcaaaaaggaaaagaataatataactccaaatatcgcagggtgtgtacacttccctgtgatattgatcctaatatccaggaagagagaggatgatattaatcccaatatcacagggggtgtacatcgcttctgtgatattcttcctaatatccagggggggaggggatgctattactcttaaaatcgcagggaacttacactcccactatgatatttttcctaatatccaggaagggagaaaatgatattactcctaatatcacatatcacaatgggtgtacatctccccgtgatattgtttctaatatcaaggatgggagaaaattatattactctcaatatcgcagggggtgtgcacacctcctgtgatattgttcctagtatccagcggaggagatgatattactttaaatattgtagaaggtgtacaacccccctttgatattgttcctaatatccagggggaaaggagatgatattactcctaatatcgcaggggctgtacaaccctatgtgatattgtttcttctaatatccaggggtggagaagataatattactcctaaaatcgaaggggacatacactccccctgtgatatttttcctaatatccagaaggaaagaggatgatattactcctaatattacaagaaatgtatacctgtcctgtgatattgttcctaatatccagaggggtaaatgattatattactcccaatatcgcaggggtgtacaccttccctgagatattgtttctaatatgcagtggaggagaggatggtattactcccaacatcacaggagatgtaaactccccttgtgatattcttcctaatgttcaggacgaaggagggtaatattactcactgtattgcagcagggggtgtagagccccctgtgatattgtttttaatattcaaggttggagaaaataatattccttccaatatcgcatggggtgtacacccttctttttatatagtttctaatatctggggggagaggatgatattactcccaatatcgcagggggattacacccccactgtgatattgtttttaatatccagggtgggagaggataatattactccaaatatcccagggctatacaccctccgtgtgatattgtttctaatatccagaggaagagaagatgatattactcccaatgtcacagggtgtgtacaggccttctttgatattgttcttaatatccatgagggagaggatgatattactcccaatatcgcaaagactgtacaccctttctgtgatattgcttccaatatccagggagggagaggatattacactcaggatcacagggggtgtacaccccaacctgtgatattgtttctaatatctagggaaaatgagggtgatattactatcaatatcacaggaggtgtacactcccttatgatattgttcctaatatccaggagaatgacaggataatattactcccaatatcgcgggtggtgtctccccccactccgtgatattgttcctaatacccagagggggagagaatcatattactcccaatatcgcaggggatgtacacctacatccggcggagtagaagataatattactcacaatatcgcaagaagtgttcaccttccctgttatattgttgctaatatccagggagtgagaagatgatattactttcaatactgagcgtgtacactacccctgtgatattgtttctcatatccagtagaggagaaaatcatgttactcccaatattgcaggggtgaacacctcctttgtgatatttttcctaatatcaggaaagggagagtatgatattacccttaatattgacaggggtgtacacccccctttgatattgttccaatatccaggggggcagaggataatattattcccaatatcgcagagggtgtacaccccccgtgatattgttcctaatatccagagaaataaaaaatagtattatttccaatatcacagggcgtacattttccctgtaattttgttcctaatatctggggggtggggtggcaggataatattactctcaatattggagagggtgtacacccccctgtgatattgttcctaatattcagggtgggagagaatgatgttactcccaatatctcaggagtcgtatacacccccttgtgatattttttctaatatccaggaggcagaggatgatattgctcccaatatcgcagggggtatacacccgagctgtgatattgtttctaatatgcaatatgggggaaggatgattttactttcaatatcgcagggaatgtacactttccttgtgattttgttcctaatatccaggggtggagaagatgctattactatattactcctcatatcgcaggcggtgtacaactccctgtgatatggttcagaatatccagagtgaaaaaggagggtgacattactcccaatatcgggggggtgtacacccctttgtgatgtggttggtaatatccaggggggcagatgagggtgatatcactccccatatcgtggaaggcgtccacttttttgtgatgtggttctttatatcccgaggggagaaggtgatattactccccatatcgcgaagggcatacacccccctgtgatatagctcataatattccggagagtggaggaagatactatgccctatatcgcgggtggcctacaaccccctatggtttggcttataatatccaggggggagagggtaatattgctccccatattgtggagacgtacagccccctgtgatatggtttgtaatatctttggggggcgagggtgatattactccccatatcgcggggagcatacacccccgtgatctggttcatagtatctcaaaggaagaagttgatgtgtacaacttaagggaaaaagttgaagtgaagtgtacacacgccctgtgacgtggttcataatatccaggcgggggagaggagagtgatatttactccccatatcgcgggtgttgtaaactcccctgtgatatagttcataatatccaggggagagaggagggtgatattgctcctcatatcgcgaagggtgtacaaccccctgtgatatggttcataatatccagaagggtagaggacgatgatattactccacatatcttgggaggtgtgatatggttcgtaatatccagcgatgagagaatgatattactccccatatcgcaaaaggtgtgatagggtttgtaatatcctgagggggagagggtgatattaatccctatattgcagaaggactacaccctcccatgacatggtttgtaatatcccagggggtagagtgtgatattactttccatatcacagggggtgtgatatgattcgtaatattcgaagggggagagggtgacactactctccatatcacggggtgtgtgatatggttcttaatatcccaggggttagaggttgatattaccccctttttggggggtgtgtacaccccctgtgatatggttcgtaatatcccgggggagacagggtgacattattccccatatcgaggggatcgtacaccccctgtggtgtggttcataatatccctagggggagatggtgatattactccccatatcagggggcgtgcactcttctgtggtataattagtaatatccagggggcagaggtcgatattcgtttccatatcatgaagggagtacacttccctgtgatatggttcctaatatccaggggggagagggtgatattattccccatattgcggggggacatacaacccctgtgatatggttcataataaccagaaaagaagagggtgatattaatccccgtattgcagagggcatacaccccccctgtgatatggtttgtaatatctaggggaggaaaaggtgatattactttccatattgctgggtgcagacacccctttatgatatggttcataatatccaagttggagagggtgatattacttcccatatcatgggaggtatacccttccctgtgatatggttcgtaatatccagaaggggagagattgatattactccccatattgtggggggcgtacaccttcctgtgatacggtttgtaatatctaggggatatagtgggtgatattactcaccatatcacgggggttgtaacatggtttgtaatatccaggggaggagagggtaatgttactccccatatctcggggcatgtacaccctcctgtgacatggttcgtaatatccaggtcgggagagggtgatattactcctcatattgccgggggtgtgttatggttcataatatcctggggaaggaggctgctatcactctccacatcttgggggatgtacactctcctgtgatatggttcataatatccagggtgggtgagggtaatattactccccatatcgcgggaagtgtacatacccctgtaatattgtttgtaatagaagagagggtgatattactccccacatcgcgggtggtgcccacccccctgtgatatggtttggaatatccagggggatgaggagggtgatattactccccatatctcggtgggagtacatccctctttgatcaagttcataatatccaaaaggaaacaggagagtgatattactccccatatcgccgggggtgtacacgggagggggagtacacccccggcgatatggtctgtaatatccagggaaggagaggagggtgatattactcaccatatcgcaggtggtctacatttacctgtgaaacagtttgtaatatccagggggggaaatgagaatgattttttttttttgagtctcactgtgtcacccaggttggagtgcagtggcacgatcttggctcactgcaacccccgcctcctggactcaagcaattctcctctcccagcctcctgaatagctgggactacaggcgcaccccacaacgtctggctaatttttgtatttttattagagacggggtttcaccatattggccaggctgatctcgaactcctgaccctgtgatccatccgcctcggcctccaaaagtgctgagattacagatgtgagccaccacgcatggcccaaggagaacgatattactccccatatcccagggggtgtatatccccctgtgatatggttcagaatatccggaaggaaagacagggatattacttcccatatcgcaaggggtgtgacatggttcgtaatatcccatgggggagagggtaatattactcttcgtattgtgaagggcatacactcccctgtgatacagttcataatattccggggagtagaggaagatattatgctccatatcgcgggtggcataagccccctgtggtttggttcataatatccagggaggagagggtaatattactccccatattgtggggacgtacaccctcctgtgatatggtttgtaatatcccagaggggagagagtgatattactccccatattgcagggacatacacccccctgtgatatggttcaaaatgtcttttttttttgaaggactggttctttatttcaaaaagacacttgtcaatattcattatcaaaacagttgcactattgatttctctttctcccaatcggccccaagtagaccacatcaaaggagagtacatattaagccaataagctgtaggatgtacacctaacagacctcctagaaaccttaccagaaaatggggacagggtagggaaagaaactttaaaagatcaacaaactgccagcccacggactgcaggggctgtcacagccagatggggtggccagggtgccacaaacccaaagaagcaaagtttcaaaataatataaaatttaaaaagttttgtacataagctattcaagatttctccagcactgactgatacaaagcacaatgagatggcacttgtagagacagcagcttcaaactcagaaaagggtaatgagatgagtttcacatggctaaatcagtggcaaaaacacaatcttctttctttctttctttctttcaaggaggcaagaaaagcaattaagtgctcacctcaacataaggggaacatgatccattctgtaagcagttgggagggggtagagatggaacaaaattttggtctcagaggtcttgccatcttaatttggtcacttctaatgaaaaaaataaaaaatagaaataacattatccaaaggtatcttaaagctgaaaacttgaacagcacattttttgttgttgttgtttggctaactcctcctggaaccacctttctggcttagctagtactttgtacagagcaatgaggcttcccatagtggagtctccctgggctctgtttggctctcagcaaggcaggcctataccttttcctctcctccatggagagaggaatatgcattaaggtgaaaaatcaccttccaaaagtgagaaagggattcgatcgctgcttcagggctgtggtattatatggaatgttttacaaaaggttgctacaaaacaacaaaagaggtaattacaaaatgtgtacatcacaacatactttttaaagacattatgcattgtgctcacattcccttaaatgttgtttccaaaggtgctcagcctctagcccagctggaatctccgggaagaggcggacagtttggtgaaaaagacacagggaaggagcgggcggcggaaggagggggcggcgaaaggagaaagcagccttccagttaaagatcagccctcaattaaaggtcagcttcgggcaggctggcctcaggcggagtctggttcagagggaggagcagcagcagggtgagactgaggcgttctacatctcattcaggtcaagcagagtctggtccagcatcctttgtgtacagaggtgctcccctttggtgcatttcagtttatcttccaagtcatcaattgtcttttccagcttggctaccgatctctcagcaaactcagcatgggtctccgcctcctttattttatcagtaagaatcttgatctcttcctcatatttgtcttctttttgagagtacttttcttcagcagcactcagacacttcaggttctggtccatcagtctaatctgctcatccatctctcggcaaagggattctgccagctcagctcgttcctctgtgcgttccaagtctccttcaatgatcaccaacttacgagccacctcttcatacttcctatctgcctcttctgcaatgtgcttagcttctctgagttggatttcctggagttccatcttttcttcatcttttaaggcccggttttcaataaccttcttacctctctcactctcatcagcagctttttccgcttcttccagcttttgcagggcagtagccaggtgctcctgagcacggtccagctcctcttcaaccagctggatcccacgttcaaggaggccacctcagcctcagcctgttcccgggcccacctttctccctcaacttctcgctggaggcgctcagctcgctcctctgcatcatctgcctgctgctgcagaacctggatcttgcgcttcaccgcctcgatggtggtgatcccagccatggtgcccacccagctactgctagagctccggttcctgcctcctccgatcggcgttgcagcctcctctcacccttacttccgcctcggttcaaaatatcttaagggaaggagttgatattactccccacatcacgggaagtttacatcccctggtgatatggtttgtaatatcccagggtggatagggtgatattactctccatatcgcgaaggagtactcccccctgtgatatggttcataatatccttggggggagagtgtgatattactccccatatcgcgagggccatatactcctttgtgacatggttcgaaatatcccggtgggggagggggtagagggtaatattactccccatacagcgaagagcatacgcccttctgtggcaaggttagtaatacttcagggaaaagagtgcaatattacttttcatattgcagggaacatacactcccctgtgacatggttcgtaatatcccgggggctgagagggtgatatttctccccatatcaccgggggcctacacctgggtgtgatatggctcataatatacagggagggagagggtgatattactccacataccgagtgaggggttacacaccctcgtgacatgttcgaaataccccaaggaggagacaatgatattactttccctgtcgcgggggctacaccctcccagtgatatggttcacaatatcccggggtggagagggtgatattactccctatatcaccggggggtgtacacttccctgggaaatggtttacagtatccccggggggagagggtactattactccccatatcacgttacatatcagggtacacccccacgtgatatggtttgtaacatcccaggaggaagaaaatgatattactccccatatcgcggtggcatacacccctccccgttaaatggttcataatatcttggggtggagagggtgatattactccccatatcacgtggggcatacaccccactatgatatggttcataatatcccggaggggagagggagatattactctccatgtcgcggggggcatatacacccctgtgatatggtttgtgatatcccgggggcggagagggagatattactctccatatcgtggggtcgtacacttttctgtgatatgattcgtaatatccagacggggagagggtgatattacttcccatattgcgggggcgtacacccctctgtgatatggttcataatatcccgaagaaaagagggtgatattactcctcatatcgcggggaacacacaccaccctgtgatatggtttgtaatattcagcgggggagagagtaatattactccctgtatctcggatggcgtacactcccctgtgatatggttcataatatccagaagaaaagagggtgatattactccccatattccagggaatgtacaccaccctttgaatatggttcgtaatatccaggaggggagagggtaatattgctcccaatatcgaaggaggtgttatacggttagtaatatccagagaaggagagggtgacattactccccacatcgtggtgggtgtgcacccacctgtgatatggttcataatattcaggttaagagaggtgatattgctttccatatcgccaagggtgtacactcccgtgaaatacagttcgtaatatccaaaaggggagagggtgatattactcccatatcgtggggggtgtacacccctctgtgatatggttcataatatccagggtggaataaggtggtattactccctgtatctcggggcatgtacatcgcctgtgatatgattcataatatccagaagaagagagggtgatattaatctccatattgctgggggtgtacaaccccctgttgtatggtttgttacactgagttggggagagggttacattactctcaatatcgagtggggcatacacacttatgtgatatggttcataatatcccagggaggagagggtgatattactccccatatcgcgggaggcatacaccccaatgtgatatggtttgtaatatctacatttttttttttgagacgaagtctcgctcttgtcccccaggctggagtatgatggccggatctcggctcactgcaacctcagcctcccgggttcaagcgattctcctgccttggtcccccaagaagttgggattacaggcgcacaccaccacgcccggctactttttgtatttttagtagagaaggggtttcaccatgttggccaggctggtctagaactcctgacctcagatgatccacctgcctcggcctcccaaagtgctgggattacaggcgtgagccactgcacctggcctggtttgtaatatctatgaagggggaaggtgatattactttccatatcacgggaggcgtacaccacgatgtgatatggtttgtaatatccagggggtatactgggtgatattactccccatatcgcggggagtgtatacccttttgtgatatggttcctaatattaagctgaggagaaggtaatattactccccatatcgcaggggtttttatatggttcataatattcaggaagagagagggtgacattactctccatatcacggggtgtgtactcccccatgtgatatggtttgtaatatccagggaaggagaggttaatattactccccatatcgcagggggtgtacacctctctgtggtttgtaatatccaaagggaagaggatgatattatcttcaatatcttggggggatacagtccccagtgatattgttcataatatccagagggggaggggatgatattactcccaatattgcaggtggtgtacaaccccctgtgatattctttataatatagagggggatgatgatattactcccaatatagtaaacaacctgtgtgtacaccccctgtgatattgtttataatatccaagggtggaaaggatgatattactcctcatatcgcagggggtgtatacccctctgtgacattgttcctaatattcaggggaggagaagatgatactactcctcatatcacaggggatgtacacccccctgtgatacttttggtaatatccaggggaggagaaaattatattattccccatgtcacagagggtgtacaccccgctgtgatagtgttcataatatccaggtgaaaagaggatgatattactccgaatatctcaggaagtgtacacccttctgtgatattgttcataatatccaaaggtggagaggaggatactactccccatatcgcagtgggtgtacacccccctgtgatatggttcataatatccaatgtaggagaggatgatattactttccatatcgcggagagtgtacatccccctgttatattgtttgtaatattcagggagaaagaggatactactactccccatatcacacggggtgtatattcccctgtgatatggttcctgatatccaagagatattataatcctctcttggattatgctacctctcatatcgcatggggtgtacacacactttgtgatatcgtttgtcatatccaaggagggagaggattatattaatcccaagatcacggggggtgtacaccctcctgtgatattgtttgtaatattaaggggggagaggataatattactcccaatataattaacaccctgtgtgtactcctccttgtaatattgttcataatatccaatgggggagacgatgatattactttcaatatcgcagaggatgtacatccctttgtaacaatgtttgtaatataaaaggcaagagaggatgatactacttccaaaattgcaggacatgtacaccccccggtgatattgttcctaatatccagtggggaagaggatgatagtagtcccaatatcgcaaagggtgtacacaccccctgggatattgttcctaatataaaaggaggagaggatgctattattcccaatatcacagaaggtgtaaaatcccctgtgatattgttcgtaatattcaggaggggagaggattatattactcccaatatcacagggtgtgtacacagggaggggcaagggccagaagcgggcgggaatccccatgtttgggcggacccagtttctaatggccagcatttgccaatcaaagcttaccagagaactctaaaagccagggctttcctgctagacaagactcatttctggaactgctttaaaaagaaacaaaacttcccaaggaccccttttcctctctgtctgcctaaaataatgttttaaaaactcctaaagcagctgaattcagcccccttcctgggggaatgtatagacggaactcccacctttcccggcatcccaaggccagagtatgtgaaactcctgggtctctatgtgtgtctgagcggctgctctgccaacactccacacagccctgtgtcctggacccaaggcccttatgacctgagctcaagaggggatctcctgatccatgggttgcaaagatccatgggagaagcatggtttctggggcggggtcacacgctcagtcactgtttccctcggatgccggagatggttcctttggctctctgccaatacagggtgaatcatcatccatccctcttttctttgttctcccgggtcaagttgtttgcctagtcagtcccaatgtgagaacctgaatatttcagttgacgcgctgacttcaaaatccccgggcttcgggaggcggagcttgcagtgagccgagatcccgccactgcactccagcctgggcgacagagcgagactccgtctcaaaaaaaaaaaaaaaaaaaaaaaaaaaaaagtccccgggcttttcttttcactcagtggaaggcagctgcttctaattggccatcttggcccgcccccaccacgtgaccttctgtaaaatgcctccactctccaggaacgctctcattatataactttgcctgaaaccaacagcacgctcattgcacatatcatgggctcatttatttcacttataaagaacctggccaaggaagagatagtgcctaaagtggccagtattctgaccgatatgttagaaaaatggtgtgccgaccaattcatgacatgtgtcccaaaactagcaacggaaattgtattcgccgtgttgaggtctctaatccagatgatgctcatctatgtactggaaaaggcagagtcctttcctgacaagctgctgaaactcttcagaaacatctcatatttcctgaagaagatgatgtctggacaagcagcacaggtcgttcagatttaactttctattcatatatccagcacgatattcgcacaattgtcacgaaaccttaccagttgatgagtcctgcacatttcctttaatttcaggaggaagagggtaatccggatgagttttctgacctactctgctgctgtgattaaacaaccaccaggaaattttgacgacactgttctcctgagctcctccctttcctccgggaacaaaacaattgaatttacaaaaataaagtgttatttgactggagtgaggtctcatgtctgcttatgcggtggctcgctgctcagaacagggtgagtctctgggttgtgtgctgaggaggggaggctctcaatctggagaaaacccactgcaggggacacctccatggggtctgagggactgaggatgaggagccggactgggtctagggaaggaggaggtttcagagggtgaaattctggcactaaagcctgggggtgtttgggaacttcctccttccgaagaagtttcagggagggataaagacaaaccctgggctccttgaggggcccttactaatttgagaggactctatcgggaaggagagtgacaatggcctccttgaggactgaggcccctgaataaatgaggcccagatacagtccatgggggatgagaccttcaagggtcacattttggttgggacagaggaaaagtgcagctctgcagccgcagaggaaaacccggcagtgtgaaagcgaccttggaggggccctgtgcgctctgaatgcgtctgagcccccatcccctgtccccgcctctctttctggattcttccagctcggctgtctccgccatcttctgagcgctccaccctgacttattcaagtttcccttctgccttccaagtactccaaaatctttcagatctgtgtccctacccctgtttttagcatgtgttggggctccaggtccctgaaggtttctggcctgaaatccacctccccagcggagtggactgcgttctagagactccacactccgcgaggttcccaggcccctgagggacaaccgagtggcctgcgcacttcagggctccacactcggcaaggtctttcaagcccttggggtccccttcttagttttttccacctttctgggctgcagtcactccataaatgctgggatctgatccccacccccactctcgtttcctcaattctgcgggctacacgctctggcaaggtcctccgggccctggatcccctccctctccctatgcccacgctcctagtcagcccttctggggtccactattttcaggaactaaccgttctcatggagccttgctaaccggaaagctgtgtggaagaaaggctttgaggatagaggtggagatttggctcttccatagtgccactcacccaccccaccatgctgccactgccagacccggacccctgtttcagaacaagtgaccagattcgctcctggacagccctggacactggccttttctctgaaaactactcaccctttctctagtccccacttcatgccagcctcataccctcttccttcccccacgctggcttccgggatcctcctctgctcagacaacctcttctgtgtcccacccccgtttttagaatgctttggggcaccaggttgggggaaggtttctggcctgatatccatctctttccaaactcccttcttcccttgaaaggcttcttgccttcagccccacttctggctccgaggtttcaggacaccctcctcttcatcctcattcttttgaccaccagctttttaggaattcgaacgtccctctcatcttcgtgaatcctgtccaggcatttgttgaccccttcatctgatacccctgacctcacattgccaaaagtctacccctacccagtacactggaattagacaaaatcccaggagttttacctcaactctgagtgtgcccacaggagctctccctgaagccacgtccttttaagcagggtctagggttcctcccttgtcttaatgaactctttgtcacacggaggacgttatggagcccttatgatctttcactgcctttctgcccagcgttttgtctttccatggacatttataatattttccatggacattttgttctctcaatgtccacccctaatttccaacatcccaaagattctcatgtgtttcctgaaagccatttacaggaatggctgtgcccagacccccttccccaggatcctccttcacacctggtaggtgcctctcctagagagatttgcactcagttgtcgtgcagtcacatggcccagatggttgttaatcacccccttcctggcaacagctagcagccagggaatcactggcacagaaacctcagggtgaccaagatgaggccacctctgtgctgaaggctgtgctccagagcctgcttgggatcaggcttaagcaggtcttcagccagacctgatgttacctggtttccttgagctgccctgcctgagctatcgggagcactccctcaatgcacatcttgattccctatctcatgctctgcttctagaaaccatgagctatcaattgctactggcaatggtcctgggaagtcaaccctaagtatggattctggggttggatgactccccacaggacttcagtgagcaacaatcactgctggcagttggaggacagagtcgctagggcatgtgaccactgtgaaaccaccgatgtttcacctggggtaattttggatgaactacggtagaagcactgaaggtacattgcttttggtttggaagattgtaggtaaataatagcgatatgaatgtggaattggatggctgcaaacgagtgccattgatgcattgaaagaggaaaagtcaggctgtcacctgtcactcagcaatttaaagtgtgagagttgggactagatgtggtggctcacatctataatccagagattcgggggaagcttgaagaggtaggatcttttgagtccaggagttccagaccagcctggacaccagagcaagacctcatctctacaacaaaattttcttaaaaattagatgggcttggtggcacgcacctgtacttgtagatctagctaatggggagcatgagataaaaaaatcacctgagtcagggacttaggggttacaatgaggtatgattgtgccagtgcacacactcccacctggccaacagagtgagattctgcttccaaaaaaataagaaataaatcaggtttgagagttggaaagcatcatcttctcctagagccaaaggacatgtacaactgagacccaggaacaaagcttcatcacaaagagaccatcatcagtggagccgggagatgcattccccctcaccctgccttgaggaggcagtggagtcatctgtctgggatcctttctgacccagccctatttgtttgtctctttggcttctttggatttgtatattttagctgttataacactgtaaaacaaacagagtgatttttttgagttgtgtgaatgatgctagctccatagtcaccctgagagtgatgggaacttttgaatttgtggcaagttggagggtagtgtaagtgacctgagattgccaaattggggctagcactggatgtgaggttaggctagtggaaaaatatgcccagaaccagaggagtgtgggctcactgcaggtggttaggctcagatccaaattgtacagatggatagctttggggtaaagaataacatagttgagaagtgcatgtgttagtctgttcatgcactgctataaagaattacctgagactgggtaattatttataaaactcaggtttaattgggtcatggttccacaggctgtacaaaaagtatgatgctggccatcagctcaacttctggggaggccccagaatagttagagtcatggcaaaaagtacaagggaagcaggctcatcttccacggccagagctggagcaagtggtaggagaggtgatacacactttcaaacaagtaggtcttttgagaactccatcaccggacagcacctatgggatggtgctaaattattcatgaaatatccgcctccataatccactcaactgtcaccagcgcagccagccccacctccaacagtggggattacaattccatatgaggtgtgggtggggacacagctccaacctcaatcagtgggcatcctggattgggtctactatagaaggagaaccaggagctgactatgatcttgaaccctacccatgatggccgggcggggtgactcatgcctgtaaccccagcactttgggaggctgaggtgggtggatcgcctgaagtcaggagttagagaccagcctggccaacatggtgaaaacctgtctctactaaaaatacaaaaaattagaccggcgttgtgctggatgcctgtaatcacaccactacgctccagcatgggaaaaaataccaaaacttcgtctcaaaaaaaaaaaaaaaaaaaaaaaaaaaaagactgcccatgaccactgcaccagtgagagggacaccagcatcactgagatgcaagggctggacattcttcataggtcagagctcaaagcaggggacactgatacagagatgggctccatccatagcaccaaagtggtgagaggatgtgggaatggcagaggccagcactttgccatcaatgcaagggggtataaggaggtgacaccagtgccagagtacatcacggggggactgccctacaatatctaggacttacctcttagagcgtgtttcattagcgacaacagatataaatggcagacaggtgtgtccctgcattaacaggaaatagaaatcatcaagaggaacagaaggcagatgtcagcagccccttagaaagtcatcatccttcatacagttaaaatctgagacagttctcacacgagaaggcctaactcaaaaagaggctgggttctcatgaggcaggtttatgcaaaaccaaggaaggtgtacaagtttggaattctccagtttcccttggaaaagacctacagtcatttgcttaggtaactgagcactgaacaaaggtgagtattgttgtcttttagaagctcttggccaagaaggccttgttggcataaaacccatggtttggaaacatcaccatgacccctgttagagtaatggcctaagggtgggggtcaggaaattgatgtattccttgccaacttctgcctctaagtgagtgaactctgtttgtgaacctctctcctctgtggttatgttcctaggctctcatgtataatcaggagtcatagacttagaaacaggaaaaatacttacagtgtttttgtggcctgtgagctatgacttataattttaggaaaaaaacaattgcaaatggaaagcctaagtctatcaatgctcatccaagacaacataatcaataaaaaccaatatcaaatctcaaggcaaattatttcctgtatatagatggcagagatgagcaccaccatcaaaaactcaaggaccagtgctgtgggtccagtcatctgtttcatggaattcaccagtctggtatcttcaaaatccagaaggatgatggcagatggcaggaaagtaatgcaaacgtcatcaggtgtgaccccactgtagcagctgtgatggatgttttctctcaccatagcaataaataacacaacctcggtcacactgtatgcattgttggtctgcaaaatccatgttttgcaaaactcttcaggaaggtggatctgtaatattggcattgacatgagaacaacagcagtatttattcacaatctcaagctctctgtcttcccgtctctctcattagccatccaagtagtcctgaggaaccaagcccatcagaacattctgcaacataatacacagctccattctccattcaaattttgttgttgttgttgttgttgatgagacaacatcttactccatcagccaggctgacgtacagtggggctatctgggctgactgtagtcttgagcttccaggctcaaggcatcctctcacctcagcctcctaagtggcttgaactacagacacacagcgacatgctgggctagtttttgtatattttgtagagacgtgctctcaccatgttattcaggctggactcaaactcctgagcgtaagtgatccaagcaccttggcctcaaagtgctgagattacaagcctgagccactgcacccagcccaatctccattctactgataacaatgtcattaccaggtctgatggacaggaaatggtaaggtttctgaaaacctaaggatcacacagcgagttccaaaggctgaaagtgcatacctgtcgacactgataccaatgacatccaatggtgagaatgacattccttgtagtcctagctctgctcataacaaatctatactgaagtgtaagagtttgatggtcatggggattttccatgtctctgcctttcagcgatgtgccatatctgtgaagtgttcagaaatgcaacagcctgaggcatgctgggcatatcctctaataaaaaggaaaatgccattttatggtcctgtatttctacaagttggaacacatgggcctgtgatccagatgggggaaatgggaatattcccactcattcaccttcatccacgaagcccatttgaaagctttgggcttcccatccttgtagattttagtgttgtgggctgggtgcagtggctttcacctgtactgccaacactttgggaggcctagacaggtgaatccactgaggccaaaagttcgagaccagcctggccaagatggtgaaaccccgtccctactaaaaatacaaaaattagcaaggtattggggccagcacctgtaatcccagctgctcgggaggctgaggctggagaatcgcttgaacccaaaaggcagagactgcagtgacccgatcctgcctttgcactccacctgggcaagcagaacaaaacttctgtcttgaaaaaaaaaacaaaaaacgaacaaaaaagatgttagagttctgggtttagaggtctataccccagaaagagaatggtttcaacaagggacaaagaagttgctttaaacgttgacttgccatttcttttcagtgtgtttgttctcttgcgtcaagagaccaccagaaaagtggtgcaattactctcctgtcaagaatcattgactatcatctgcaagagggtcagatcctggtatataattagggcagaaatacttagtctgagaagggtatgacatccagaggccctattaatgatgtccttttctccatgcctgactctgaccccatgtgctggactgcccctgtgtggatggcctcatggcctgctcggactctgaggtcccaccccaagtggcacctccatggagggctctactcttgtatgggctctgacactcacactgagacactctcccatggacacctcttcacccacttggggtctgaaactgggctactccatccctccctaacctggaacagagagctttcactgctattacacaagtcatagaggctaactcctcatttttccaagctaattattgaaacattagtcctgggttgataagacaagataagttaacttttcataaatttgcttatcaagttttgaataaattcaaataaattcaccttccccacacaccttagttgtcgacatcacacgcgcacccatactcacagggtgagcacgaaggcttcactgtcagtggagaaagtggcaaaacccttctgtgcctcatcctggtctagacctggccctcatcctttcccactcttcccctcactcccttggattcatccacactggcctcctgcctgctgctccacctccctgcgaagctcacccctgcctcagggcctttgcacgtgcagtggcttcaagccatatcctcttcacccagatctcccagatctcctgaatgatcttcttttatcattcaggtctcagcttgcatgtaatcttctcagtgaggattacccaaaccacatagttcattcattcattcaaatattcattcaatggcatattgacaaagcagctacttcatgccaggccttgggccaggtgttatggatatggcaacaaacaaaacaagagttttctgctctcaaatttttacccacttaaaggagatatcatacatcatctgtaaataaatacatcatctgtaaataatgatgtaaataaatacatcatctgtaaatctgtaaataatgatgtaaataaatacatcatctgtaaataaataaagtataataaaagaaaatagtaggtttttttggttggaggtgaccgtgaagtttgcaaataccatcttacaacacattattttattttatttcatttcatttttaattttattattattatactttaagttttagggtacatgtgcacaacgtgcagatttgttacatatgtatacatgtgtgaagttggtgtgctgcacccattaactcgtcatttagcattaggtatatctcctaatgctatccttcccccctcccccaccccacaacagtccccggtgtgtgatgttccccttcctgtgtccatgtgttctcattgttcagttcccccctatgagtgagaacatgcggtatttggttttttgtccttgtgatagtttgctgagaatgatggtttccagcttcatccatgtccctacaaaggacacgaactcatcattttttatggctgcatagtattccatggtgtatatgtgccacattttcttcatccagtctatcattgttggatatttgggttggttccaagtctttgctattgtgaagagtgccgcaataaacatacgtgtgcgtgtgtctttatagcagcatgatttataatcctttgggtatatacccagtaatgggatggctgggtcaaatggtatttctagctctagatcactgaggaatcgccacactgacttccacagtggttgaactagtttacagtcccaccaacagtgtaaaagtgttcctatttctccacatcctctccagcacctgttgtttcctgactttttaatgatcgccattctaactggtgtgagatggtatctcactgtggctttgatttgcatttctctgatggccagtgatgatgagcatttcttcatgtgttttttggctgcataaatgtcttcttttgagaaatgtctgttcatatccttcacccactttttgatggggttgtttgtttttttcttgtaaatttgtttgagttcattgtagattctggatattagccctttgtcagatgagtaggttgtgaaaattttctcccattctgcaggttacctgttcactctgatggtagtttcttttgctgtgcagaagctctttagtttaattagatcccatttgtcaattttggcttttgttgccattgcttttggtgttttagacatgaagtccttgcccgtgcctatgacctgaatggaaatgcctgggttttcttctagggtttttatggtttgaggtctaacatgtaagtctttaatccatcttgaattaatttttgtataaggtgtaaggaagggatccagtttcacctttctacatatggctagcctgttttcccagaaccatttattaaatagggaatcctttccccacttcttgtttttgtcaggtgtgtcaaagatcagatagttgtagatatgtgacattatttctgaggactctgttctgttgcattggtctatatctctgttttggtaccagtaccatgctgttttggttactgtagccttgtagtatagtttgaagtcaggtagcatgatgcctccagctttgctcttttggcttaggattgactttgcaatgcggggtcttttttggttccatgtgaactttaaagtagttttttccaattctgtgaagaaagtcattggtagcttgatggggatggcattgaatctataaattaccttgggcagtatggccattttcacgatattgattcttcctacccatgagcatggaatgttcttccatttgtttgtatcctcttttatttcattgagcagtggttttagttctccttgaagaggtccttcacatcccttgtaagttgggttcctaggtattttattccctttgaagcaattgtgaatgggagttcactcatgatttggctctctgtttgtctgttattggtgtataagaatgcttgtgatttttgtacattgattttgtatcctgagactttgctgaagttgcttatcagcttaaggagattttgggctgagacaatgggttttctagatatacaatcatgtcgtctgcaaacagggacaatttgacttcctcttttcctaattgaataccctttatttccttctcctgcctaattgccctggccagaacttccaacactatgttgaataggagtggtgagagagggcatccctgtcttgtgccagttttcaaagggaatgcttccagtttttgcccattcagtatgatattggctgtgggtttgtcatagatagctcttattattttgagatatgtcccatcaatacctaattattgagagttttcagcatgaagggttgttgaattttgtcaaaggccttttctgcatctattgagataatcatgtggtttttgtctttgggtctgtttatatgctggattacatttattgatttgcatatattgaaccagccttgcatcccagggatgaagcccacttgatcatggtggataagctttttgatgtgctgctggattcggtttgccagtattttactgaggacttttgcatcaatgttcatcaaggatattggtctaaaattctcttttttggttgtgtctctgcctggctttggtatcaggatgatgctggcctcataaaatgagttagggaggattccctctttttctattgattggaatagtttcaggaggaatggtaccagttcctccttgtacctctggtagaattgggctgtgaatccatctggtcctggactgtttttggttggtaagctattgattattgccacaatttcagatcctgttattgctctattcagagattcaacttcttcctggtttagtcttgggaaggtgtatgtgtccaggaatttatccatttcttctagattttctagtttatttgcgtagaggtgtttgtagtattctctgatggtagtttgtatttctgtgggatcagtggtgatatcacctttatcattttttattgcatctatttgattcttctctctttttttctttattagtcttgctaccggtctatcaattttgttgatccttttaaaaaaccagctcctggattcattaattttttgaagggttttttgtgtctctatttccttcagttctgctctgattttagttatttcttgccttctgctagcttttgaatgtgtttgctcttgcttttctagttcttttaattgtgatgttagggtgtcaattttggatctttcctgctttctcttgtgggcatttagtgttataaatttccctctacacactgctttgaatgtgtcccagagattgtggtatgttgtgtcttttttctcgttggtttcaaagaacatctttatttctgccttcattttgttatgtacccagtagtcattcaggagcaggttgttcagtttccatgtagttgagcggttttgagtgagtttcttaatcctgagttctagtttgattgcactgtggtctgagagacagtttgttataatttctgttcttttacatttgctgaggagagctttacttccaagtatgtggtcaattttggaataggtgtggtgtgatgctgaaaaaaatgtatattctgttgatttggggtggagagttctgtagatgtctattaggtccgcttggtgcagagctgagttcaaatcctgggtatccttgttaactttctgtctcattgatctgtctaatgttgacagtggggtgttaaagtctcccattattattgtgtgggagtctaagtctctttgtaggtcactcaggacttgctttatgaatctgggtgctcctgtattgggtgcatatatatttaggatagttagctcttcttgttgaattgatccctttaccattatgtaatggccttttttgtctcttacgatatttgttggtttaaagcctgttttatcagagactaggattgcaacacctgcctttttttgttttccattttcttggtagatcttcctccatccctttattttgagcttatgtgtgtctctgcacgtgagatgggtttcctgaatacagcacactgatgggtcttgactctttatccaatttgccagtctgtgtcttttaattggagcatttagcccatttacatttaaggttaatattgttatgtgtgaatttgatcctgtcgttatgatgttagctggttattttgctcattggttgatgcggtttcttcctagccttgatggtctttacaatttggcatgtttttgcagtggctggtactgactgttcctttccatgtttagcgcttccttcaggagctcttttagggcaggtctggtggtgacaaaatccctcagcatttgcttgtctgtaaaggattttatttctccttcacttatgaagcttagtttggctggatatgaaattctgggttgaaaattcttttctttaagaatgttgaatattggcccccactgtcttctggcttctagagtttctgccaagagatcagccgttagtctgatgggcttccctttgtgggtaacccgacctttctctctggctgcccttaacattttttccttcatttcaactttggtgaatctgacaattatgtgtcttggagttgctcttcttgaggagtatctttgtggcattctctgtatttcctgaatttgaatgttggcctgccttgctaggttgcagaagttctcctgggtaatatcctgaagagtgttttccagcttggttccattctccccatcactttcaggtacactaatcaaacgtagatttaatcttttcacatagttccatatttcttggaggctttgtttgtttctttttactctctttcctctaaacttctcttctcacttcatttcattaatttgatcttcattcacttatatactttcttccacttcatcaaatcggctactgaaggtattgcatgcatcatgtagttctcatgccatggttttcagctctatcaggtcatttaaggtcttctgtacattgttttctctacttagccattcgtctaatcttttttcaaggtttttagcttccttgtgatgggtttgaacatcccctttagctcagagatgtttgttattactgaccttctgaagcctgcttctgtcaacttgtcaaagtcattctccatccagctttgttccattgctggtgaggagctgcgatcctttggaggagaagaggtgctctggtttatagaattttcagcttttctgctctggtttctccccatctttgtggttttatctacctttggtctttgataatggtgacctagagatggggttttggtgtggatgtcctttttgttgatgttgatgctgttcctttctgtttgttagttttccttcgaacagtcaggttcctcagctgcaggtctgttggagtttgccggaggtccactccagaccctgtttgcctgggtatcaccagcggaggctgcagaatagcaaatattgcacaacagcaaatattgctgcctgatccttcctctggaagcttcgtctcaaaggggtgcctggctgtatgaggtgtcagttggcccctactgggaggtgtctcccagttaggctagatgggggttagggacccacttgagaaggcagcctgtccattcacagagctcaaacactatgctaggagagccactgctctcttcagtgctgtcagatggggatgtttaagtctgcagaaatttctgctgccttttattcagctatgccctgcccctacagatggagtctacagaggcaggcaggcctcattgagctgcggtgggctcctcccagttcgagcttccagaccactttgtttacctactgaagcctcagaaatggtgaacacccctcccccacccagtctgccgccttgcagttccatctcagactgctgtgctagcagtgagcgaggctccatgggcgtgggacccactgagccaggcacaggatataatctcctggtgtgccatttgctaagaccattggaaaagcacagtattaaggtgggagtgtcccaattttcccagtacagtctgtcacgggttccctcatctaggaaaggtaaatcccctaaccccttgtgcttcccggtgacgcaatgccccaccctgcttcagctagccctccatgggctgcatccactgtccaaccagcccaatgagatgaacaaggtacctcagttggaaatgcagaaatcacccatcttctgtgtggatcaggctgggagctgcagaccggagttgctcctattcggccatcttggaatggcaatctatgtttgctttttacatttgaaaaaactggtgtcacgtacctaggtattaatcattgtggtatcctcttgccgatttacctctttatcattaactagtgaccctccttgtcttttgttgttacagtctgtgattttagtctattttatctaatatgagaatagctactctggcacttttttggtttccagcttcatgaaatatccttttccatttccctgttttcatttccctttcggtgtctctatagatgaagttgatttctttaaggcaccataagttgggtcttatttctttatccatttgaccatttagagaatttagaacactgtcagtgttattattcataagtaaaaacttaagagtgggtgtagtggtgtacatctgtatttcctgcactttgagagactgaggcgagctgatctcctggggtcaggagtttgagaccggcctggtcaacatgatgaaaccctgtctctactaaaaatacaaaaattagccaagcatgctggcatgtgcctgtaatccaatttacttgggaggctgaggcaggagaagcttgaacctgggagacaaatgttgcagtgagctgagatcacacagagaagtcatctccactctcctcatcagaacctcttgttcacagcatttgtgagcacaaatcaatgatggttattctttcctactaattagggatattttattacacagcaatagcctccagcaaagggaaccatcatacatgattcctacaagttgacagggctggaattatcactgaaaaactaaggtggctatacttgattcccaatgtccaatttttcatgaatagagaaatttatcctttttccccccagccagaaaccaagttttgctcttacgcccaggctggaatcaagtggcacaatctcagctcactgcaacctctgccccccagcttcaagaaattcaccttttgaacaaggagatattaaggatacactatgtgtatgctaccggtggttgcaggagactcagaaaagagagaaacagtcactggcctcgtgcaactgatattctcgggaggagagaaaggcaatcaagaaagaaacatgctgtatttcagacagctgtaagtcctccacaagaaaagaaagcaggtgaggaacataggaaatgtgtcaaccataaggttcccgctaattctataagttggtcagggatatcctccaagaataagcagcatctgagcaatcacctgaagggaggaaggaaggaagactgtgagtggtggcttacacctgtaatcccagcactttgggaggccaaggagggcagattgcctgagctcaggagttcacgaccactcagagcaacctgttgatacccaatctctactaaaaacacacaaaaaaattacccgggtgtggtggcacgcacctgtagtcccagcttccatgcccagctgatttctctctctccatatatatatatatatacacatatattgtttttgcagagatagggtctcactgtgtcacccagtcatcaagcaattctcttatactgttttggaaaagcatgggaattacaggtgtgaaataccctgctggtcctgaaaaatgtgatatttgggattctctgcctggcttgttttacccaaaataatgacctccagttccttccaggttgctgcaaaagacatgattttcactgttttataactgaatagtattcctgtatgtatacataccacattttctttatttattcttctgttgattgacatgtagggtgattccatgtctttgctactgtaaataatgctgcagcaaatatttgtgtgcattttgatctattcctttgagtaggtacccagtactgcaactgcaggactgagtagttgttatattttttgttctttcagaaatctccatagtgtttgccataaaatctgcactaatttacattcccaacaacaatgcataagatttccccttttctccacattctcactaacatttgttatgtttttgtctttttcataatacccattctgactggagtaagatatctcattgtggtggttgttgatatttttgagacggggtctcactctgttgccagactggagtgcagtggtgtgatcgtggcttgctgcaacctccacctcccgggttcaagcaattctcctgcctcagcctcccgagtagctgggactacaggcgcgtgccaacaggcctggctcattttttgtatttttagtaaagacagggtttcaccatgttggccaggatgatcacagtctcttgagctcatcatacacctgcctcagcctcccaaagtgttggaattacagtcatgaggcagcgcacccaacctcaatgtggttttaatgaccatttctctgacgattcatggtgtggagaatttctttgaaataccttttggccatttatatgtgctcttttaaaaactgactcctgtccaggtgcggttgagcatgcctgtaaccccagaacttcgggaggctgaggccaatggatcacttgaggcaaagaggcagaaatcagcctggccaacaaggcaaaaccccatctttactaaaaatacaaaaaatcagccacgggctgtgactcgtgcctgtggtgcaagttactcaggaggttaaggcacaggaattgcttgaacccggtaggcacaggtcacagtgagccaagatcatggcactgcactacagcatgggtaatagagaaagacctgtctcataaaaacaaatgaataaataaataagataaaaaataaaaaagtctctttatgtcctttgccgactttttaatgggattctttggagttttctgttgtagttgagatctttgtttactctcggtattagtcttttgtcaaaggaaaagtttacaaataatttcttccgttctgcagtttgtctgctcactctgttgagaggattatttctttggctgtgcagcagctttttgtttcagtaaagcttttgaatttatataattaaaattttcagtttggtttaaatttgcactggtcgatttttggttttgttgcctgtacttttgaagtcatactcttgaactctttactagacaataaccagaagagttttctctagttttcttctcacatttttattatttcagtacatatatttaagtctataattcatcttcaattgatttttgtagaaatagtgagaaataggagtccaggtttattcttctgcaaatgacaattcaattgttccagcaccaattattgaaaagggtgtgctttcctcaacgtatattcttatcagctttgtcaaagatcagttggctataaatgtgtggctttctttctgggctctctagtctgttacatcaatctgtgtgtctatctgtatactactaccatgctgtattggtgatgatggctttgtaatataatttgaagtcaagaaatgtgatgctcccagctttgtttatttgcttcagaaaggctgagtcaacagctgcagagatgaagctgcccctcctcgcagggctccttcccggaaaaagatcatggctcccactgaccatataaccatggctggaactcctgaaattcccaaagggaggccctacccagtgaggggggatgaatgaaggtcctacttaaggaatctgtctggccacaatcaggcacagcagctgtgctgccttgtgggggaccagaccacctggattccctggagcctgcaggctagaatgtctgagtccatggaaacacagaaatggaggccgccctcacctccccagaaaactgtagtctcaggcagtctccagccgattgccactggttggctgctattccaagccagtgggtcttaacttgagaggtgctgtggaagtggggcccacggaatgaggctgcttggctccctggattcagccccttttctaagggaatgtacagatggaactcccgccttgcccagctttccaagtatataaaactcctgagtctctgtgagtgtctgagcgagtgctctggcaacattcgacacggctctgtgtatctgacccaagacccttatggcatgagctaatgggaggatcttctgatccatgcgtggcaaagatgcatgggagaaacatggtttgtgggtaggggttgtgcattcactactgcttctcttggctgtaggtgaaggtttctttggctctgtgctgatactgggtgcaccatcacccaccccctttgtttcttctcctgggtcaagtcatttgcctaatcagtcccaatgtaggaacctggatacttcagttcaaggtgctgaattcaccgtgcttttcattcaggggaagacagctgcttctcattgggcatcttggcctgcccacttcacgtcactttttgtaaaatccacaccactccaggaatatccattacttaacttcgcctgaaataaacagaaggctcattacacttatcatgggctcacttacttcgcctataatgaaggtgccatggaaatgctagtggatgacgtggtccattttcttagggatgagatagaaaaatggtgtatggctttttaatttaattaaaatttttagtttggtttaaatttacattggtctctttttggttttgttgcctgtacttttgaagtcttactcgtgaactctttactggacaatgaccagaagagttttccctaagtttcttctgatattttgaccatttcagtacatacatttcagtctataattcactttaaattgatttttgtaaacatggtaagaaataggagttcagatttattcttccgcatatgataatgcaactgtcccagtaccaattattgaaaagggtgtgctttccctagtgtatattcttgtcagctttgtcaaagatcagttgcctatgaatgtgtggctttcattttggattctctcgtctgttacatcaatctgtgtgtccacatttatacctgtaccatgctgtattggtgactatggctgtgtaatatattttagagttaggaaatgtgatgctcccagctttgttcatttgcttcagctgaaaaggttgagtccacaattacaaagatggcagccgcccatccccggaggacctccaacccagaaagagatcaggcttcccaccaaccctataaccctggctggagttcctgaaattccaacagggaggaccttcccagtgaggagggatgaatcaaggtcaaatttaaagaaacagtctggccactatcaggcacagcagcagtgctgccttgtgggggacccctcctgctccagaccagctgccctccctggagcccgaaggctagattgtctgagtctacggaaacagagacggtggccgccccaaccacccagaactcggtagtctcaggcacttggcttgctatcttgccactgcttggctggtattccaagcccgtgggacttgagaagtgctgtgatgatggggaccacaggatgaggctgtctggctccctgtgatatggctgtgatgagtggaggaacaccagggctcatgtctcacacagaattggagaaaatgacacaaacacatgtacagtggttttatggcgtgcagtttaataggcaagaacgaaggaagagctccccatactgagacagagggaggggggctccaaagccaaaagaggaaacccggagtgctgtggataccaatgagttatatgaagaaactggagggggcggtgtctgatttgcatagggttcaggcgattggttcgaccaggcatgtcatttatgtggcccacggaaaaactggccctcccacctagcctttgaatatgcacgtgccggacaccctgatttcctacactcatggggatatatgggggtggccatatcgccaggcacaggtggggacaagggccagaagagggcgggaatcgctatgtttgggtggacccagtttctaatggccggcatctgcagatcaaggttaccggagaactctaaaagccggggctttcctgctagacaagactcatttctggagctgctttaaaaagaaacaaaacttcccaaggaccccttttcctccctgtctgcccaaaataatttcttaacaactcgtataacacctgaattcagcccccttactgggggaatgtaccaacggaactcccacctttcctggtttctcaaggctagattgtgtaaacctcctgggtctcggtctgtgtctgagcagctgctctgccaacactccacacagccctgtgtactaggcccaaggccgccgtgactcagcccatgggaggatctcctgatttcttggttgcaaagatccatgggagaaaaatggtttctggggcggggtcacacactcatggcttctcttggctgtgcaagaaggttcctttggctctgttccaatatagcgtggttcatcacccacccctgttttctttgttctcctgagtcaagttgtttgcctagtcagtcccaatgtgagaacctgaatatttcagttcacgtgcttatcgtgaaattcactgagactttaattcagtggaaggcagcctcttctaattggccatcttggcccgccccctccacgtcacctcccataaaatggccacgctctccagggacgatgccattatatatctttacgtgaaaccgacagaacacttattacactttttgtgagctcatttacttcacttataatgaacatggccatggaaatgctagtggagaaagtggtcgattttctgatggatgtgataaaaaaatggtttgccgaccaattaatgacatatgtctcaaaactagtaacgagacccttaatcgctgggttgaagtttctaatcaagaagatgctcatctatgtattcaacaaagcagcttcccttgcttctgaaatgcttccaaacaacatctcatatttcctgaagaagataatgcctggacaagcagcacaagtcattcaggtttactttcagctcataaatccagcaggatattcgcacaattgttgggaaaccttatcagttcatgagtcgtgcatgtttcctttaatttcaggaggaagagggtaatctggaagagtttcctgacctactctgctgctgtgattaaacaaccaccaggaaattttgatgacactgttctcctgagctcctccctttcctcggggaagaaaagcattgaaactacaaaaataaagtgttatttggctggagtgaggtctcatgtctgcttatgcggtggctcgctgctcagaacagggtgagtctctgagttgtacgctgaggaggggaggctgtcaatctagaaaaaacccattgcatgggacacctccatggggtctggggggctgaggatgaggagctggactggatctagggaaggaggaggtttcagagggtgaaattctggcagtaaatcctgggggtgtttgaaaacttcctccctcagaaggagaagactcagggaggaataaggacaaaccatgggtcccttgaggggcatttactaacttaagaggactttatcgggaagcagagtgacaatggcctccttgaggactgaggcccctggataaatgaggcccagatccagatccagtccatgggagatgagaccttcaagggacatatttttgttgggacagaggaaaagtgcagctctgcagctgcagaggaagccttggcagtgtgaaagcgaccttggagggggccctgtgcgttctgaatgcttctgaggtccatcccctgtccccgcctctttttctggattttttgggctccatggtctccgccatcttctgagcgctccacgctgccaccttcagttttctcttctgggctccaaatactccaaaatctttcatatctgtgcccctacccctgtttttagcatgtgttgggactccaggtccctgaaggtttctggcctgaaatccacctccccagcggtgtggattctgctctagagaccccgcacttggcaaggttcccaggcccctgggggacaaccgagtggtatgtgcacttcagggctccacactcggcaaggtctttcaagcccttggggttccctcctcagttttcttcacatgtctgggatgtagtcactctataaatgccgggatgtgatccccaccccagtgattttttttagttccatgagtgttgctatctgaatagtcatcctgagagtgatgggaccttttgaatttgcagcaagttttagattagtgtgagtggcctgagatcgcaaaactggggctagcattggatgtgaggttaggctggtggaaaaatttgcccagaacctgaggagtgtgggctcactgcaggtggttaggatcagcacagaattgcaaggatgtatagctttggggtaaagaataacatggttcagaagtacatgtattagtcttttcatgcattgctataaagaattacctgagactgggtaattaattataaaaactcaggtttaattggctcatggttccacaggctgtacaaaaaggatgatgctggccatcagctcaacttctggggaggcgtcagaaaacttagagtcatggcaaaaagcacaagggaatcaggctcatcctccatggccagagctggagctagtggtaggagaggtgctgcacacttttgaacaatcagatctttttagaactctatcaccagacagcacctagaggatggtgctaaattattcatgaaatatccacccatatgatccactcaattctcaccggcccaaccaggaccacctccaccattggggattacaattacacatgagatgtgggtggggacacagatccaaactcgatcagtgggcatcttggactgggtctactatagaagaagaaccaggagctgactatcatccttaagactgcccatgatggccaggcagggtggctcatgcctgtaatcccagcactttgggaagccaaggtgggtgaatcccctgaggtcaggagtttgagaccagcctcgccaacatggtgaaaccctgcctctactaaaaacacaaaaaattagatgggtgttgtgccagacgcctgtaatcacagctactccagaggctgaggcatgagaattgcttgaacctgggaggcggaggtggcggtgagccccaatcgcactgctacactccagcatgggcaacaataccaaaacatcgtctcaaaaaaaaaaaaaaaaaaaaaaaaggctgcccatgaccactgccccagtgagagggacaccagcatggctaagatcaagtgctggacattcttcatgggtcagacattaaagcaggccacactgttacagagatgggctccattcatagcaacaaagtggtgagaagatgtgggaatggcagaggccagcactttgccatcaatgcaaggtgggcataaggagctggcaccagtgccagagtgcatcaggggaggactgctttgcaatatctagcacttacctcttagagtatgtttcattagggacaacagatataaatggcagacaagtgagtcccttcagtaacaggaaatagaaatcatcaagaggaacagaaacagatgtcagcagccctcatataaagtcatcatccttcatccagttaaaacctgagacagttctcacataagaaggtctaattcaaaaagagactgggttctcatgaggcaggttcatgcaaaaccaagggaagtatacaactttgggattctccagcttcccttggaaaagacctacaatcatttgcttaggtaactgagcactgaacaaaggtgagtattgttatctttcagaagctgttggccatgaaggtcttgctggcataaaacccatggttggaaacatcaccatgacccctgttagagtaatggcctaagggcaagggtcaggaaattgatgtattccttgccaacttctgcgagacgagtgttggtccactcatctctttcacggaattcaccagtctggtatcttcaaaatccagaaggatgatggcagatggcaggaaactaatgcaaacaccatcagttgtacctccactgtagcagcagtaatggatgttatctcttcattgtaatatccagggagggagaagatgacattattctcaatattctaaacaccctgtgtgtacagcctctgtgatattttttgtaatatccgtgtgggagagaattatattactcctaatatctcaggggttgtgccccctctgtgacaatgttcctaacacccaggaggggataggatgatatcacttttagcatcacagggggtgtacaccccactgtaatattgttcataatatccgggggggagagaatgatattactcccaatatcgcaaagactgtacaccaacctgtgatattatttgtaatatccataagaggaagaataatattactcccaatgtcacaggaagtgtacacccttctgtgatattgttcaaaagatccagttagggaggggatgatattactctcaatatcttaaacaccctgtaggtaagccctctgtgatattcctcataatatccagagggagaggatgatattactcccaatattgcatgaagtctacaccccacctgtgatattgttcctaatatccaggatgggagaggatgatattactcccaatgtcgcaggggatgtacaccttccctgtaatattgttcgtaatatctagaaaaggagaggataatattactttcaacatcgcagggggtgtacaccttccttgttatattgttgctaatatccagggaaaaagaagatgacattaccaccactattgcagaaggtgtacacccccccttgatatagttcctaatatccagaaaaggagaggagatattactccaaatattgcaagaggtgtacattcccctgtaatatttttcctaacattcaggaagaaagagagtgatattgcccttaatattgaagggagtgtgccccccccgtgatattgtttctaatatccaagaaatgaaaggatgatattactcccaatatcacaggggctgtacagccccctcccatgatattgttcccaacatcggggggggggtgaaatagtattattcccagtatcacaataggtgtacacacctgtcgtgatattgttcctaatacccatgggggaaaggacgatattattcttaatatctcagagggatgtacaccctccctgtgatattgttcctaatatccggggtgggagaggatgatattacccccaaaatctcaaagggtgtacacccctcttgtgatattgttcctaatatccagggtggagaggataatattattcccaatatccaggaaaggaaacgatgatgttactgtgaatattccagggggtgtcctcccctctgtgatattgttcctaatatccaggttggggagattatgatatttctccaaatatcacaaggggtgtacaccaaccctgtgttattgttcctaatatcgatggggggagaggacgatattactcccaatatcacagggggtgtacaccacctttatgatattgttcctaatatccatgaagaaagaggatgatattactttcaatatcgcaggggatgtacactccccctgtgatattgttagtaatacctaggagaagaaagtgtgatattactcccaatatcgcaggggatgtacacgcttcctgtgatattgttcctaatatttagggggaaaggggatgatattactcccaatatcgaatggtgtgtacacccccccgtgattctttttttttttttttttttttttttgagatggagtcttgctctgccgcccagactggcgtgcaatggcgcaatctcggctcactgcaacatttgcctcccaggttcgcacgattctcctgcctcagccttcggagtagctgggattataggcagctgtcaccataccaggctaatttttgtatttttagtagagttggggtttcaccatgttggtcaggctggtcttgaattcctgacctcaaataatccacccaccttggcctcccaaagtcctgggattacaggcataactttccctgtgatattcttcctaatattcaggaagaaagaggatgatattgctcccaatatcgcagagagtgtgcactcctcctgtgatatggttcttaatattcagaggaggagaggatgatattactttctatattgcagaaggtgtacacctccctcgtgatgtctttcctaatatccagtgggggagaggttattagtctcaaaatcacagaaggtgtaaacccccatttgatattgttcctaatattcaggggtggggagagaaaggtattactcctagtatttcagggcatgaacacccccaccgtgatatcattcctaatatccagaaggggaggcaatgatatttctcctaatatcacaaagggtgtacaccccttctgtgatattgtaaatattctgtgtgtacacccccctgtgttatagtctgtaatatccgggtgggggagagggtgatatttctccccatattgtaggggatgtacacccttctgtgatatggttcgttatatccagggaagaaaaaggtaatattgctgcccatattgtggagagtgtacacccccatgtaatatggttcgtaatatccaggagtggagagggtgatactgctccttacatcgaggaaggtgtacaccttattgttatatgattcgcaatatccaggggaggagagagtgatattgctccccatgtcgcagggggtgtaaaccctccgtgatatgattggtaatatccaggaaaggaaagggtgatatttctccccatatcgcgggggacgtacatcctcctgtgatatggttcgtaatatccaggaggaaagaggaaaatattgctcttcataacccgaggggtgtacaacccctgtgatatggttcgtaatacccagaagtgtacacccctctgtgatatggtttgtaatatccagggggttagagggtgatattgctccccatatcgcagtgggggtacacccccctggattggttcataatattcatggggggagaaatttacatttatcctcatatcagggggggtgtacaccccccgtgatatggttcgtaatatccaggggaagaaagggtgatattgctccttatatcgcggaaggatcaccctcccctgtgatatggttcataatacccagacgggaagagggtgatattgttcttcataaagcgaagggtgtacagccccctgtgatatggttcataatatgcaaaaggggagagggtgatattgctccccatatcacggagggtgtactcccttctttgatatggttcgtaatatccaggggtgtagatggtgatatagctcgccctattggggagggtgttcacccctctgtgatattgttcgtaatgtccagggaaagagaggatgatattactcccaatatcgcagaaggtttacaccactctgtgatattgttcataatatccagggaaggagaagacgatattactcccaatatggcagggggtgtagaactcctgtgatattgtttgtaatatccaggcaaggagaggatattactctcaatatcgcagaaggtttacacccctatgtgatactgttcatgatatccagggaaaaagaggatattactccctatatcacaaagggtgtacacccctttgtgatattttttgtaatatccaggggagagaggataatattactctcaatatcagaaggggtgaaaaccctcctgtgtcattgttcataatatttagggaaggagagagtgatattactccaaatatcacagtgggtgtacacccccctatgatattgttcctaatttccagaaggggagatatgatattattgccaatatcgcagaaggtgtacaccttactctgacattgtttgtaatatccagatggggaaatgatgatattactcctaatatcacagggggtgtacacccccttgttttattgtttgtaatattcaggggaagagacgattatattactcccaatatcgcagggtgtgtacaacactctatgatattgttcataatatccaggggaggagaggaagtgtacacccccccgtgatattgttcgtaatatccagaggtagagaggatgatattactcccaatattgcaggtggtgtacacctttctgtgatattgtcatgatattaagaaggggagaggatgatattactaacaatatcacaaaaactgtacactccctgtgatattgttcataatatccagaagaagggaggatgatattattctgaatctcgcagaagatatacaccaccctgtgatatggttcataatatcctaggggaaagaggatgacataactgtcaatatcgcagggggtgtacaattccctgtgatattgttcacaatattcagagggaaaaaggataatattactttcaatatcgcaggcggtgtacacattactgtgttattgtttataatatccggaatgagagaaaattttctcccaatatcacaggaggtgtacactcccctgtgatattgttcgtaatatccagggaggggagaggatactattactcccaacatctcagggagtgtaggccccccctttgatattgttcctaatattcggaagtggagaagatgatattacttccaaaatcgcagggggtgtacactccctctgtaatattgtttctaatattcatgagtggaaagaaagatattactcccagtattgcaggggacatacaccacactgtgatcttgttcacaatattcgggggggagaggatgatattactcccaatatcaaagtaggtgtacacccccttctgatattgatcgtaatatccagaattaaagatgataacgttactcccaatattgcagggggtgtacatttttgaatactgttcataatattaagagggggaggggatgatatctgtcccaatatcgcaaagtgtgtacacctcctgtgacattgtcccaaatatccagaggaaaaaaggatgttattactcttaatatctcagagagtgtacacctccctgtgatattgtttgtaacatccagaagaaagaggctgatattactcttaatatcgcagggggtgtacacccccgccccgggatattattcgtaatatccagggggaagtggaatgttcagaatgggagaggatgatattacttgcaatatcatagtgggtgtacaccccactgtgatattgtttgtaatatccgggaaaggagaaaatgacattcctccccatatggcaggggctgtacaccacctatcatattgttcaaaatatccagaaggggagaggatatgtctccaagtatcacagggggtgtacaccccgctgtaatattcttcctaatatccagggtgtgagaggataatagtactcccaatatcccagggcatgtacaccccccttgtgatgttgttcctaaaattcatggggagaaagaatattactcccaatatcacagggggtgtacatacactctgtaatattgttgccaatatgcagcaggagagaggatgatattactcccaatatcacaggggctgtacaccccgctgggatattgtttctaatatcaagggggaaaaaggatgatattactcccaatgtcgcagggtgtgtacttcctctttgtgacattgttcctaatatccaggagagaagagggtgacattccttccaaaactgaaaggggtgtacacaccctttgagatattgtctttaatatccagaacgaaacaggatgatataactcctaatactgcaggggggtacaccctctctgtgatactgtttctaatatccaggaggggaaagaaaaatattaatcccaatatcacagggggtgtacattccccctttaatattgttcctaatatccaggaagacacaggatgatactatttccagcagcacagggcatgtacacccctttgtgatattgttcctaatatccaggaaaagagaggatgatattactgtcaatattgcagggcgtatacactggttctgtgatattgtttctaatatccgggggtggagaaaatgatattactcccaatattccagcgggtgtacacccgttctatgatattgttcctaatatctgggggagagagaatgatattattgtcaatatcacaggggatgtacagattccctgtgatattgtttctaatattcacagggggagaagggtataatactcccgatatcgcagggggtgtacactccccctgtgaagttgttcctaatatccagggattgagagaatgatattactcccaatatcacaggcggtgtaaaccccctgtgtgatattgttcctaacatccagaggaaaagatgatgatattattttcaatatcacagggggtgtacgcatccctgtgatattgtttctaatatccaggggaggagaggatgatattattgttaatatcgcagggggtgtaccccaccctgtgatactgttcctaatatccggggtggaagaggataatattgctcccaatatcgcaaagggtgtacaaccttcctgagatattggtcctaatatccagggagggagaggatgatattactttcaatatcacagggagtttacacaacccctgcgatattgttcctaatatccagcggaagaagagttaggataatactattttcaaaattgctgggtctgtaccccctccccgtgatattgtttctaatatccaggaggggagaaagtaatatgactcccaatatcttagaagatgtacaccctccccataatattatttcttacatccagggggtagaggatgattttgctttcaatatcacagagggagtaaacctttccggtgatattgtttttaatatttaaaaagagagaagataaaattactcccaatacaaaggggatgtattgtgtactcccccctctgatattcttttttaatatccagatggagagaggatgatattactttcaatattgcatgggatgtataaatcccctgtgttattgttctgaatatacaggtggggagagtatgatattactccaaatatcgcagggggttctttccccctgtgatattgttcctaacattcagggagggagaggatgatattactcttaatattgcagggggtgtacccacgcctatgatattgttcctaatatccagagggggagaggatgatctaactcagaatatgacaaggggtgtacacacagcctgtgatatggttcctaatatacaggggagaaggggataatatttctcccaatatcgcagggggtgtacaaccccctgtgatactgttcctaatatacagaaggggacagcatgatattgttcctaatatcgcaggaggtgtacaacgccctgtgatattgttcctaatatccagggcgggagaggatgatattaccctcaatatcgcagggggtgtgcactttccctgttatattgttcctatgatccgggtggggggaaatgacattagtcccaatatcgcaggatgtgtgcaccgctcccccgtgatattgttcctaatatcaagggggagagaggaggatattactcccaatatcgcaagggatgtacatcctccatgcgatattgttcgtaatattcaggaggagagaggatgatattactcttaatatcgcagaaagtggacacccaccctgtgatgttcttcataatatccagggaagcagacgattatatgactttcaatatcgctgggagtgtacatcccttttgggatattgtttctaatatccaggaagggagaggattatattactctcagtattgcaggcagtgtacaccttttttgtgatattgttcctaatattcagaaagggaaaggatgatattactcccaatattgcaggtggtgtatatccccctctgatattgttccttatatcaaggaagagaaagaataatattactcccaatatcaaagacagtgtagacccctcctgtgatattgtatttaatatccatggggaaagaggatgatgttactcccaatatcgcagggggtttacacccacactgtgatattattcctaaaatccagtggaggagaaaataatattgctcccaatattgcagggtgtatacaggccctcccccgttatattgctcctaatatccagcggtggagaggatattactttcaatttgtgtagggagtgtatacccccctgtgatatttttctaatatcaaggatgggaaaggatgacattactcccaatatcgcaggaggtgtacacgccctgtgatattgttcctaatatctagggaaggagaggatgatattactttcaatattgcaggagctgtacaccctctgtggtattgttcttaatatttaggttgggagaaaatgatatgagtccaaatatcgcagaaggcatacacacttccaataacattgttcttaatatccgggggagagggtgatattactcccaaaatctctggggggtgtacacccccttctgatatttttcctaatatccagggaaggaaacgatgatattactataaatattccaaggagtgtacaccttcctaatatcctaatattgttcctaatatccaggggtgggagaggattatattactcccgatatcgcagtgggtgtacacccctcctgtgatattgtttctaatatccaagctaggagaaaatgatatcactctcaataccacagggggtgtacaccttccgcatcatattgttcctaatattcagagggaaagaagatgaagttactttcaatatcggaggggttgtacacaacccctgtgatattgctgctagtatccaggaagaaaggggattatgttactccccttatagcagggggtatacacctcccctgtaatattgttcctaatatcaaggctgggatatacgtggggggaaggatgatattactcccaatatcgcaggggttatacaaccttctgtgatattgctcctagtaaccagggcagaagaagatgatattactcctaatatcgcaggaggtgtacactcccccattatgttgttcccaatatgcagaaaaggagaggatgacattattgccagtatcgcagggtgtgtacaccacccctgtaatattgttccaaatatttagggggagagaggatgatattactcccaacatcgcagggggtgtacacacatcccctgtaatatagttcttaaaatctaggggaaaaggggatcttatttctctaaatattgcagagggtgtacactccccggtgatattgttcctaatagccgggagggagataattaaattactttcaatatctcagagagtgtacatcgcccttgcgatattgttcctaatatccagagcaaaagagaatgatattactcccaatatcttaggagtgtacatttaacctgtaatattgttcctaatatccagggggaagagaatagtattactgccaatatcgtaggggttgtacaccttttctgtgatattgttgcaaatatttagtagagggaaagaatattactcgcaatatcacagggaatgtatacttcccctgtgatattgttctgatatccagaaaaagagagggtaatattactcccaatattgcagggggtgtacaccccccttgtgatattgatcctaatataaaggaaggaagaggatattactcctcatatagaaggggttgtccaccccccttgtgatattattcctaatattcagggaagcagaggatgatattattttcaatatcacagagggtgtgcagtccacctgtgatattgttcttaatattcggggggagaggatgttattatgcctgatatcgcagtagaggtacacccctcaagtgatactgttcctaataaccaggggtgaagaggatgatattactcccaatatcgcaggtggtgtacacccccccatgatggtttctaatatacagagggggagaggaaaatattactcccaaaatcgctggaggtctacaccccccttgtgatattgttcctaatatccaggaaaggaaacgatgatattactgtgaatattccagggggtgtacacccgctttgtaatattgttcctcatatccagggtgtggagaggattatattactcccagtatcgcagggggtgcacgacgcccctgtgatattgtttttcatatccaggaggggagattattatcaatatggcaaggggtgaacaccccctgtgatattgtacttaatagttaggttggcagaaaatgatattagtctcgatatcgcagggggtgtgcactccgcctggtgatattgcttttaatatcaagggggagaaaatggcattactcccaatatcgcagggggtgtacaccgctcatgtgatattgttcctaatatccaggtggagagaacataatattactcccaatatcgcacaaggtgtacacccctcctgtgatatggttcctaatatccatgggaggagatgatgatattactcccaatatcacaggggatgtacaccacccttgtgatattgttcctaatatccagggaagaaaacgatgatattattgtgaatattacagggagtgtacacactccctgtgatattgtttttgatatacagggtgggagaggatgatattactcccaatatcacataaggtgtacaccccccgtgatattgttctaaatatttcggtggggagaaaatgatattagtctccatatcacagggggtgtgtgctcctcaggtgatattgtttttaatatcaagagggggaggagattatattactttcattatcacagggggtgtacacccctcctgtgatattgttccttatatccaggcgaggggaaaataatattactctcaatatcgcaggaggtgtacacaccccatgtgatattgttcctaatattaagggggaaagaagataatattactttcaatatcacagggtttgtactcctttcttgtgatatagtttttagtatccagggggaaagagcatgatattactcccattgtagcaaggggtgtacacacctcctgtgatattgttcctaatatccagaagtggtgaggatgatattactcccaatatcgcagggggtatacaccccacctatgatattatttctaatatccatgggaaaagagtatgatattacacccaatgtcgcagagggtgtgtatttttcctgtgatattgtttctaatattcaggcggggagaagatgatattactctcaatatagcagaaattgtacatccccgctgtgatattcttcataataatcagggaaaaagaggatgatattactaccaatattgcaggggggttacacttcccctatggtagtgttcctaatatccaggaagaaagaggatgatattaatcccattatccaggaagtgtacacccaccctgtcatgttgttcctaatatccagcagggaagaggatgatattacaccccccccccgtgatattctccttaatatccaggaggggagaggctgatattactggatatatagcaggggtgttcataccttctgtgatattgttcctaatatccagaaaaggagaggatgatattacttccaatatcgcagaaggtgtacacctccctgtgatattgatcctgacattcagaaggggagaggatgatattactcaaaataccgcagggcatgtgcattcccttgtgatattgttcctaatacccagaagggaacaggataatattactttcaatatcgcagggagtgcacacccccctttggtatggttcttaatatccagaaggaaagagggtgctattactttccatattgcaaggggtgtacaccccactgtggtatggttcataatatccaggcagggagagggtgctattactccccacagtgcggggcatgtacaccctgctgcggtacggttcctaatatccagggggagagaggatgctatgactccctatatcgcggggtgtgtacacccctgtgtggtatgttttgtattctccaggaacggagagggtgttgttacccctcatatcgctggaaatgtacactcccctgtggtatggttcgtaatatccaggggattgagggtactgttacccccatactccccatatcgtggggggagtgcacctccctgtggtatggttcgaaatatccagggtaagagagggtgctattattccccattttgcaggaggcgtacacccccctatggtatggttcgtaatatccggggtgaggggatgctatcaaaagaagagagaaagagaccccccatattgttctatattattttatactcagtacctgttttaagaagaaacaaggaagtgaaaccaaaagcaggcagcccggcgccaggcaccagacccaaaaccagacccgaaaccaggcctgggcctgcctgaccttagcctgatagttaaaattcaacccatgacctagcaaccaatgttatccatagattccagacattgtatggaaggacattgtgaaatttcttgttctgtgctgtttcactctgattaccggtgcctgcagcccctgtcacatacccactagattgctcaatcaatcatggccctttcatgtaagatctttagtgttgtgagcccttaaaaaggacagaaattgtgcactcaacaagctcggattttgagacgctagtctttcgatgcttccagctgattaaaagccacttccttcactacctcggtgtctgtggggttttgtccgcgactcctcctgctacactatgactccccatatcaaggggggtgtacacccccctgtggttcgtaatatccagcaggggaaaaggtgctattactccccatattgcagggagtgtacacccccttgtagtatggatcgtaaaatcaaggggggagggaaggtgtaattatccccatatctcagggggtgtacacccctttgtggtaaagtttgtaatatccagggatattacagggatattatccccaaattaatacttttataatttcttatgcctgcctttactgcaatctctgaacataaattgtgaagatttcatggacatttatcacttccccaatcaatacttttataatttcctatgcctgtctttactttaatctcttaatctcatcatctttgtgagctgaggatgtatgtcgcctcaggaccctgtgatgattgcattaactccacaaattgtttataaaacatgtgtatttgaacaatatgaaatctgggcaccctgaaaaagaacaggataagagcgatgttcagcgaacaagggagataagcataaggtctgactgcctgtggggctgggcagaacagagtcacatttttcttattgcagaaaatgagtaggagaaatatcactgggaagggaacgcattcctaggggaggcctatggacggccgctctgggggtgtatcccttatgtggttgaagataagggatgaaatacaccctggtcccctgcagtgccctcaggcttgctaggattagaaattccagcctggcgaattctagtcagaccagttctctgctcttgaaccccgtttcctgttaagatgtttatcaatgacaatgcgtgcacagcaggacatggaacctcaatagtaattccattttctccctggccttgtgaccttgctaggcccttctgcccttgtgatcttttattgccatttgaagcatgtgatctctgtgacccactccctattcgtatccccctccccttttgaagtccctaataaaaacttgctggttttgcagatcaggtggtcatcacagaacctgccgatatgtgatgtcaccccggaggctcagctgtaaaatttctctttcgtactctttcactttatttctcagaccaggtgacacttaaggaaaatagaaaagaacctactttgaaatattgggggctagttcccccaatagacattgttcctaatatccagaaaaaaagaagatgatattactcccaatatcacaggggttgtgaaccccacctgtgatatggttcctaatatccaggaagggagagaatgatattactctccatattgcagggggtgtgcacatccctgtgatattgttcctaatatccaggggaggagagggtgatattactcccaatattgcaagggttgtaaactccaccctgtaatattgctcctaatatttaggatttagggggggagaggataatattactcccaatatcgcaggggatgtatatgccctctttgatattgttcctaatatccagggggggagaggataatattactttccatatcacaaagagtgttcacccccctgtgatattgttcctaatatccaaaaaggaagaggatgatatcaatcccaatatcacaggaagtgtacaccccccccttttatattgtttctaatatccaggggaaatgagggtgatatttctctcaatatagcagaatgggtacactccccctgggatattattcctaatatccaggggaaaaaaagaggttgatattcttcccagtatagcagggaatgaatacaccctttgtgatattgcttctaatatcaaggggaaaagaggatgatatgactcccaatatcacaggggatgtaaacctgtggcgttgttgctaatatcaaggagggaagagtatgatattactcctaatgtcgccgaaggtgcacactttccctgtgatattgttcctaatatccaaaagggaagagaatgatattacccccagtattgcagggtgtacaccacccctgtgatattgctcctaatacccaggaaaaaagagaatgctattacccccaatatctaaggggacgtataccttccctgtgatattgtttctaatatccaagtggggagaggatggttttactctcaatattgcagggagtgtacactccccctgtgatactgtttctaatactcgggctgggagaaatagtattactcccaatatcgcagtgatattgtttccctgtgatattgtttctaatatctagtgggggagataattatattactaccccatacacaggggagggtgtacattcccctgtgatattgtttgtaatatccagggaaggagaggatgttactcccaatatcacaggggttgtacaccccttttttgatattgttcctaatatctggggggcagagaattatattactgtcaatatcacagagtgtgtacaccccctctgttatattactctttatattcagggcggtagaggatgatattactccctatatcacagggggtgttcacccctcctgtgatattgtttataatatctaaggggaaagaggatgatatcactctcaatatcaaaggaaatgtacacctttcctgtgatattgtttttattatataggggggcagaggatgatattaagaacaataccacaggggatgtacacccacgtattgatattgtccctaatatgtatggggaaagaggacagtgtaactcccgatatcgcagagtgtgtacacccccttgtgatattgtttctgatatacacggggagaaaagataatatttcttccaaaattgcagggggtgtacaaccccctgtgatattgtttttaatatccagtgggggagagaatattactcccaatattgcagggcgtgtacacaacccctgtgatattgttcctaatatccagagtaggggaggatgacattactttcaatatcgcaaggggtgtacattcccctgtgatattgctcctaatatccatgaggggagaggatgatattattcctaatatggcaggggctgtacaccttccctgtgatattgtttctaacatccagtgggggagaaaatgatattactccctatatcacagaaggtgtacactttccctgtgatattgttcctaatatccagaaggggagaggataatattactcccaatatcgcaggaagcttacaactcccctgtgatattgtttctaatatccagggaggtagggatgatattactcccaatatcgcaggggatgtacactcccccgtgacattgtttctaataaccagggggtgagaggatgatattacgcttaataccgaagggggtgtacacacccttgtgatattgtgcctaatagccagggggaagaaaattatattaattttaatatttatggggaaaaaggatgatattactcccaatatcacaggggctgtacaccgaccttttgatattgtttttaatatccagaagagaagaggataatattgctcccaatatcagaaaaggtgtaaaccccttctgtgatattggtcctaatatccagggagggagagaataatattactaccaatatcacagaaggtgcccacccccaaggtgatattgctcctaatatccaaagataatagggtgatgttactcccaatatcacaggaggtgttcacaccccttgtgatattgtttctaacgtacagggaagggagaggatgatattattcccaatatcacaggaggtgtatactcctctgtgatattgattttaatattcggggggaaaggatgatattactccctatatcgcagagggtgtacaccctctgtaatattgatcctaatatccagggcgggataggatgatattactcccaatatcgcagaaagtctacacaacccccagtaatattgtttttactatccagggggaagaggatgacattactcccaatttcacagagtgtgtacactcaccatttgatattgtttctaatatctagggggagagaatatattactcccaatatcacaggaattgtacaccacctctgtgacattcttgtgaatatccggggaaaaagagaataatattactcccaatattgcagagcgtgtacacccctccatgatatcgatactaatatttttttaaagaggatgatattactcccattgtcacaggatgtgtacaccccccttgtgaaattgttcataatattctggggggagagcataatattactccccatatcgaaaaaggtgtccaccctccttataatatggttcctaatatccaggatattacttaatccaggatacttgtaataccctaaatatacaattgcttgaacctccacctcccaggttcaagcaattcttctgcctcagcctcccgagtagctgggactacaggggcacaccaccacacccagctaatttttttttcttgtatttttagtagagatggggttttgccatattggccaggctggtctcaaactcctgaccttgtgatctgcccacctcagcctcccaaagtgctgggattataggcgtgacccaccgtgccaagccaggaagaggatgctctatagatttccccaataagagatggctttgcagggccattccaaaatatgtcaaagaaatacatttggggataaaatactttgatttcctttagggaatgttatctattatgtgatgctataccagagtcaggttggagtcggttatcttattgcaacaaagagtctgttccgtcactgttgggatctctattttttcctcttatttcttgagacagggtctcactctgtcacccagtctggagtgcagtggtgcgatcttcattcactgaaacctctgcctcctgtgttcaggtgattctcgtgcctcagccccttaagtaactaggattacaggtgtgcgccaccacacccagctaatttttgtattttcagtagagatggtattttgccctgttggccaggctggtcttgaactcctggcctcgtgtcatctgcccacctcgacctcccaaagtgctgggactgcaaatgtgagctattgtgcccagccaggatctctgttttaatgttagtgctggtcactttgcatgaactccaaagggaagaaatataatgaggtgtgtctgaccccctgccttctcatcgtgacctgaattagtttttcaggtttgcaggggatacccttggacaagaaggggctctattcggttggttggggggattagaattttactttttgtttacaatatttctcctgaaagagttaggggctcacaaggaatttccgcgtgagcaacttatgaggaaagccatctgggaagatatgtgtccttgtgtcactgggatattctcgtttaccccaatgatacggcaatgacgcagggttgtgaaattacagctatgtgtttggggaaaaaagaaagcaggattgtgtgactacgtttccaaacttcacttgcccttagccatagtgagttgggggcctggagattctgttttctttcacaatgatatagatacaattaaatgtatagaaagcaaaaaaataaaaaggtgagtaatgaggaacctctgattcctgagtggccatgtagttacccatggcacagagccacagttactgaaggtaaagtttgctggggaatttagaaatgaatccagctcttggaggagtcagtttactggatgcctaagaaaatgcaaacaaaataagaaaaaagggtaatattcaatcccatagttattgttacctgtcatagctaaagtaaaattaaaacagagtgctggcttcaatcttgatgctacactaagcttagatttcagtgaatgtgagtctcagccactagctcagagccacctcccaaagaccaaatcatgtagggacaatagaaagtacttctgagaattgtggttaccaagaacctagtaactgttggggaggagcaaaacaaagtacagaaaccagagggtacaatctgagtgagactgctatcagcttctggaggagcctttactaaaatgaatgatgagagtaactggatgatgagagtaactaatggatgatgagagtaagcaatgtctttggttttcttttttttttttttttttttttagcagacgtctcactcttgtcgcccaggctggagtgtaatggcatgatctcgcctcactgcaacctccacctcctgggttcaagcaattctcctgtctcagcctcccgagtagctgggactacaggcactcatcaccacacctggctaatttttgtatttttagtattttctggtgagggtccaggtttccggaaacaactcagagacatatgttaagatgttatctttagttttcacagggaaccaaatatgttacgactccaatttccttggctattgttttaagttaccattaccttctcgttgatcaagttgctcatttacttctcaagcctagctagatgcctggaatttcccttgaaggaagtcaagattttcctttatctccatactggctgatggtgatcgagtaagcccctaagaggggtccctgctccatctcgagatgctgctagattctacagtgcctaataaacagctctcgcctggccgacaaagagctgcttgctctctggatagcaattccaaagtgaacagacaacatcctgtttggaagactgccactctgttagaagaagcatcaggaaaacctttcttttgagctatttataactaacagcaattgaccaagtatacttttgtgagtgaaactgacctttctccctgtaagaattctccaaaatttggaaactatttgtgagtatttttacttatggcaatataattattggcacaagctcaatcagattcggttttctttcgtaacaggaaccattggagatactcattactctttgaaggcttacagtggaatgaattcaaatacgacttatttgaggaattgaagttgactttatggagctgataagaatcttcttggagaaaaaaagactgggtatattttcaatatgctttccttttaaggtccctcacctgtggaaagtaaagaatgtcactttctgacaggctcaggaacctcaagttatgtagggatctcaagaagatgggggaattcacccagttcatacaggtgaaattgctgttgcaaagattatgaatatgagagaagtccagcatggctgacttcatctcgtgtctggcctcaggctggctgcccttgctcactcttgggcataggccaagctagccatgggaggaatttagtttatagtttaactttgaagcacggatgataatagtctctccctaaaatgaaccccttccttgctcagggactgaaactacctttgtatgacaaatgaaagcccacaagattaagattatgagaggggcctgaattctgctaaaatgcaggtgtagctgactgataacaagtcattgtcccacagcttgcctttctataatctcttgcttctcaggagtcacatggccagaggtcctgagatttccagtcctgtgacccccacccagagatggacttagtgcatgaggaccattttccacacccctatgatttcatcctcaaacaatcagcagcaaccattccctagccccctgccttccaaattatccataaaaatcctagcctctgagttattagggagattgattaataatcccagtcctaccccttgggttgctctgatttaattaaaccttctctactgcaataccacggactcagtaaattggttttgtctgtgcaatgggcaagaagaacatgttgcatggttatacaggtactacaagcacagtctgatggcaaattattggttttgcttcctgcccttgatgtttctaaacatctagtccaaaattacttgtgaaaggtccagcaaagccaattttaaaagaggctatatggccaatcactattctttctacacattattgcaaataatcaggccacggctgggcacggtggctcatgcctgcaatcccagcactttgggaggctgaggcaggatcacctgaaatcaggagttcaagaccagcctaggcaacatgataaaaccctgtctctactaaaaatacaaaattagccaggcatggtggcatgcacctgtaatcccagctacttgggagactgagggaggagaatcacttgaacctgggaggcagagattgcagtgagctgagatcacaccactgcactccagcctgggcaatagagtgagactttgtctcaaataataataataataatcagaccaagtataatgaaattaaaatttattttgcaaataaattggtcctactacaatttatccttcatagaaatgtggaaactgaagataaaaaaaattaggtttcagaagaaaactatactacacctgttattagattctagccctaaacattgtttttgaggtttttattatttacctgcaatttggtctaaattctgaattatttcctgactacaagtatccaaggaataaatgggttttctttttctttatgatagttttagttggcttctaatgcaacaacaatttttattgtaatcctgtgtgcattctattcctactattcaaattattaatgttatagatctttcattgtagtacttctgaattaaccaaaatcacagtattctgaagatgattctacaaagcctgctgtttctacaaaggctgctgatgatttctacaaagcctgctgtagtgttgctgtggcctctgcttaaaaaagtagaaaacacattgatgcagcatgttcaccccaacctccctgcctaaaggctcagggaccatcttggaagaggaaggcgcgtgagattgtaagagccgaattagggggatggagtgtggagaataaggacacttcatcttggatgctcacctgccaaattgacttctgatgaaagccagctccagaaatgtgcctacagttactactttcacctaaaccctgcccttagtcaaatccttctcttcttctaagcaatcaacttcaattccttgtataacccacagtataaaagggcttttataccattctatcctattgcatgtaagccttgggtctgggaggtaacagtgtgggattccaccatctcatctccctgccacccaaacatgcctgctcttctttaagcaatattaaatgtttgtacttcagaaatttgatttgtcagcctcttcttcagactctcagcttctttggcctttgggagtaaatttgcataggcctgctcaaaacaggatgttctgggggtttgggggtgttgttttgttttgttttttgttttgtttagagacagggtctcactctgtcacccaggttggagtgcagtggtgcaatcatggcacactgcagcctcaaactcctaggctcaagcaatccccccaccttggcctcccaaagttctgggattacaagcataagccaccatgcccagccctggacttttctttaaagacatttacacagtgtaggaattactgtgggtgcactgctcaggtccccttctccaggatgctcattcctacctcatagatgattttcctgcagagatttgacctcagctgaagggcagtcacctggtccaggtggttgctattcacctccttcctgagaacagccaacagccagggacacgctagcacagagatataagagcgaccaaggtgaggccccttctgtgctgcggtgcatgctccagagcctccctgggatcagacttaagagggtctccagccagatctggtcttcgctgctttcctcgagctccccagcgcactcctgcaatgcatcttttttttttttttttttttttttgagacggagtttcactcttgttgcccaggctggaatgcaatggcgcaatctcagctcaccacaacctctgcctcgcgggttcaagtgattctccttcctcagcctcccaagtacctgggattacaggcatgcaccaccacgcccagctaattttgtatttttagtagaaacgggtttctccatgttggtcaggctggtttcgaactcctgacctcagttgatcctcctgcctcagccttccaaagtgctgggattacaggtgtgagccactgtgcctggcccaatgcacctcttgaatcacctcctcatgctttgcttttagagaacatgatccccaacatgtgattccagcaaagattctagaaagccaaccgtgacaatcacttctgggtttagatgacccccccccaccacaagatggcagtgagcacctcatcacagaggtgctgatggtctgcagcaccgcgccaggccagaacgtgccttttacagaagaaaataacccagtagctgactaggatggtgaggagggctggtgagcactgcggtagtgagagggacactagcatcactgagatgcaagtgatggtcatttttcataggtcaaagctcaaagcaggggacagttacagggcagggcttcatagcaccagtgtgatgaaagtatctgggagtggctaaggccagcactatgccatgggaagcaaggtgggcctgaggaggaggcagcagcgtcagcctgcaacaagtgggggctgccctgcagagacctaagagtcatgttatagagcacagtgtctgtaaggccaagaagtgtggacagccaagtgtgtcaattactagacatactcaagaggagcaggaagggcagggcatggtggctcatgcctgtaatcccagctacttgggagactgaggaaggagaatcgcttgaacccgggaggtgaaaattgcaatgagccgagatttcgccactgcactccagcctgtgtgatgggagcgggactccatctcaaaacaaaaaaagaaaaaggaaaaagaaaaaaagaaaaacctaggtatacttctcaagcaaataaaaataatcaaaaccaatatcatgcccgggcacaaatttcatatatataacagatttaaatatatgagggtgattatcctctcatatctccatttttttttgtttttccatttttttctttactaaaaaaagttaatgccaatgacacacaatttttttttttttttttttttttgagatggagtctcacttcttcgccctggctggagtgcaatggcgtgatctcgactcactgcaaagtctgcctcctgggttcaagcaattctcctgcctcagcctcccaagtagctgggaccacaggagtgagccaccacacccagctaatttttgtatttttaatagagacggggtttcaccatattggccaggctggtctcaaactcctgatctcaaataatctgcccgcctcggcctcccaagattctgggattataggcgttgagccactgcgccccgcctatgtatgattttttttttaattttattttcataagtttttggggaacaggtggtattttgttacatgagtaatttctttagttgtgatttgtgagattttggttcacccatcaactgagaagtatacactgaacccaatttgtggtcttttatccctcacccccttcccaccctttcccccggagtccctgaagtccattgtatcattcttatgcctttgcatcttcatagcttagctcttgaacccttactttctgtttgagggagaagacatatcatctacaagtagatactgtgtaaacattccattgcatgactatcccataacttatttattatttgtgtttggttatttgctgctatgtaacaaccccactcccaactaaatggtgtgacaattccatgattctgtggatcaaaaattctgaaaagtcaaacccaaggagttttgtctctgctccatgatgctaaagcctccgcaggggtgaggcgaatggctcagggtgactgaaaagctcagggttggaacagctggggatgaggcctctatgtataagatgattcttcactcacaggtctgaaactatggtggggacagccagaaggctcggctcagctgggacagtcacctgagccctacacatgacctctccaacatggtgatcctgaagcagttgggtttcttacacagcatcacacttttcttttttttttttttttttgagatgaaatattgctctatcacccaggctggagtgcagtggcacgatctcagctcactgcagcctccgcctaccaggttcaagcgattctcctgctccagcctcccaagttgctgggattgcaggcgcctgccaccaagcccagctaatttttgtatttttagtagagacggggtttcaccttgttggccaggctagtcttgacctcttgacctcaggcgatccgcctgcctcggcctcccaaagtgctgggattacaggcatgagccaccgcgcccggccaaagctcacacttcttatgattcagccttagatgtcacatcagttcattttccccacacttattagtgttagaagtcacaagcccacccatactcaggggactggcacacagaccccactctcaatggaaggggtgggacaccaccattcctgctgatgggcatttgggtaacttcctgtttgaagctattaagattgggctgctgtggccgggcgcagtggctcacgcctctaatcccagcactttgggaggccgaggcgggcggatcacgaagtcaggagatcgagaccatcctggctaacacggtgaaaccccgtctttactaaaaataccaaaaaaaaaaaaaattagctgggcatggtagcgggcgcctgtagtcccagctactcgggaggctgaggcaggagaacggcgtgaacccgggaggcggagcttgcagtgagccgagattgtgccactgcactccagcctaggcgacagagcaagactccgtctccaaaaaaaaaaaaaaagattgggctgctgtgactattctagtaggtgtctttggtgagcgcctacacgtgtttctctttttctctttagtatatgcccaggaggggaactgctggctcccagataccgtatgttcagggtcacacacacttccacagggttttccaaagcccttgtaccagcacgcactcccagcacctgtgtgactgctccagctgtcccacagtctcatcagttctattgctgatattttcattttagcttaagttatatttaataggaaaattaccgttgcctctgccccccgttcctgcctgtaggagtttctcgtagctgttgctacaggtggccacaaatctgtcacttaaacccacacaaattgatgtccttatggctttggagtcagaagtgtcaactgaaggtactagcagggctgtactgacctggtggcctcagggagcatctgtgctgcttctccaccttctagaggctgctgcatccctcgctccagccccttcctgacaccactcaccctcctacttctgttatcacatcctcaccttctctgtgttcagggctccctctgtctctctcttgcaagcacacttgggattccattgagggccacccacataacccaggagaatttctccacctcaatatccttaacaactgcagagcccttttgccataaaagttaccattcacgggttccagggattgtgacatgggtagctttaggagtgattattcctgcctgtctcccgctcaccagaacttggactttctctctcaacaggagccccctgtgtgggaatagcctgtctcaacgacgccctctataaggacctgcttcctcaaaggacctcatagtcgggtcctgcccctcagtgtccagtctgccttggctggaggggctgcaggggtgtgttggcgccacctggtggagacagggcatcacagcaggtgggagcccagtagaagcacaaccaaaacatgggtaatgtttaaaattttctggctaagcgctgtggctcacgcctgtaattccagcactttgggaggccgaggtgggtggatcacatgaggacgggagtttgagaccagcctggccaacatggtgaaacatcccctctactaaaaaatacagaaaaattagctggacatgtggcgcgctcctgtaatcccagctactcgagaggctgagacacgagaatcgcttcaaccccggaggggttgccgagatcgcgccactgcactccaggctgggcgatagagcgagactctgtctcaaaaaaaaaaaaagaagaggggaggcgaggggaggggaggggaaaagggggaatttgtttggagctgagacatccatcttctcctgacctcagatatttgcactcctggttatgaagccttcacacttggactgaatacaccaccagctttcccgatttccagcgtgcaaatggcagatcgtgagacttctcagcttccataattacatgagccaatttatatatataaattgggtcctccagaaaaacagaataaattatatatataattatacgcataacttaattaaattatacgtataacttagctatatatataatttattctgtttttctgaagaaccctactgacacaaatgttgagcatcttttcatgtgcttattggcttaataacttgtacatcttctttggggaaatgtctattcaagttctttgcccattttgtaactgaactattaatatttgtctttacattgttgagttgtaaaagttccttatatattctagatactagagccttatcagatatatttctgcaactattttctcctaatatataggttgtgtttttattttctttttctttttttttttattgagacagtctcactctgtcacccaggctggagtgcagtggcatgatcttggctcactgcagactcgacctgccaggctcaagcaattctcccacttcagcctcctgagtagctgaggttataggcacttgccatcgcacccagctaatttttgtattttttagtagagccgaggtttcgccatgttgcctaggttggtcttgaactccctgcctcaaagcgatctgtcagcctcagtctccctaagtgctggaagtacaggtgtgagccacagtgcccggccatctattttcaatagtgttttttgatgtacacaggtttggaattttgataatgttcaattcatccatttttttttttttttttttggttctttctactggaccaccactcttgagccctctaatccaacctccacgcggcagccagagggagctctctaaatgtaattactctttccctgctccacctgctcaaaacagtgtcacatttgtgatttaaaacagtatttctcaaacctaatttgcaaacaaagcaggtggaactcttcttgtatgcacagcatctgatttggttggtctggcatgggtctgggagtgagcacacctaccaagcggctgctggggtaacttgcgttttccactgatgatttcagcaatgtttccggtcccacatgctcctccagaaccttgtactcccccatgaaaaggtggagtccatttccccttcctttatttatttttttgagacgaagtttcactcttgttgcccaggctggagcgcaatggcgtgatctcagctcaccgcaacctccgcctcctgggttcaagcaatgcttctacctcagcctcccgagtagctgggattacaggtatgtgccaccacgcccagctaattttgtatttttagtagagacggggtttctccatgtcggccaggctggtctcaaactcccgacctcaggtgatccgcccgcctcagcctcccaaagtgctgggattacaggcgggagccaccgcgcccggctatttccccttcctttgaacctgatcaggacttgacgatggcatcaacatggtgagagtgaccctgcatggcttatgaggctgggttacacaaggcgatgttgcttctgactggctccctctcaggatacatgcccttggaacccatcctctaagctccttgggagcccaacttagcccatgtggagacaagacagggagagaaacagaggcacccccagccctcagccagcatcaaccgccagacaggagagcaaatgcgccaacaatgattccagctgaagcctcagacagcgtggagcagagatgagggatccctgcagattgcagatgcgtgagcaaaatgcatgctgtcactgttttgaaacaacaatgtctgggggctgtttgttatgcagcaatagacagctgtaacaatgctgttactgctgtattccatgaatgactgcactttgagtagcagggggctagatcactagataagccccatggcttctgtgtatgctatttttctacttttatatccttttcattcactttttttttttttttttttgagacagagtctcactctgttgcccaggtgggagtgcagtggtgcaatcttggcggactgcaacctccacttcccgggttcaagcaattattgtgcctcagcctcctgagtagctgcgactatagatgcacccccatgcctggctagtttccgtatttttagtagagacggggttttgccatgttggccaggctgatctcagactcctgacctcaggtgatccacccaccttggcctcccaaagtgctgggattacaggcgtgaaccactgcacccagcctcattcactttctttacttggctcatttttccttgttgcctcaattctcctctaagatcactttcctgacatttcagcctgggcctgttgccttctctgggtcccctccgcctcctgtgcctcccccatctcagccttgatccctcagattatacttcctctgtccccaccctgaccatcttggctgtccctggatagggatgggtatcttctcccactggtctgggagatctggaaggacaggcctggaaaagacttggtcactgctggaaggagctcagttagtgtggtgctgaggacagtacgggtgaggctggccccttcacccaaactcccactctcttccatagatttcacctctgtggcccaggccataggattagggcaactccccttaaacatcgagtccatcctccaagctgtccttttttttttttttttttttttttttgagacagagtctcgctctgttgcccaggctggagtgcagtggcgcgatctcggctcactgcaagctccacctccagggttcactccattctcctgcctcagcctcccgagtagctgggactacaggagcctgccaccacacccggctaattttttgtatttttagttgagacggggtttcaccgtgttagtcaggatggtctcgatctcctgacctcgtgatccgcccgcctcggcctcccaaagtgctgggattacaggcgtgagccatcgcgcccggcctcatgctgttcttgaatagtgagcacctgttacaagtcgccccaccagcctctcacttgtacccccctcatctctttctccccaagagacagaggaccctggcacttgtgaagcatgacccagaccctggggccatggcatccaacatcctcattccccatgacccctactgtctagatgtagctgccaagagacccccagactccccgggcctctgtctagagtgccaagacagagagagaatgccctgccgcttgcatgctttgtggggtgtccttcccccttccctggctgctaggcgtgacttcaacgttctccccaacccccaaacagcagcactgacaccagctgcagacctggctcaggttagctaatgaggaccaggctggggatggagcctgaacccctaaaccccagtcctgtaccccaccctaatcctggggtctccactggacaaaacgaagcagcttggtttttcgttgttattgtttttgagatagagtatctctctgtctcccaggttggagtgcagtggcgtgatctcagctcactgcagcctccgcctcccgggttcaagtgattcttgtgccgcagcctccccagtagctgggattacaggcgcgtgccaccacacccagctaatttttgtatttttagtagagacagggtttcaccatgttggccaggctggtctgaaactcctgacctcaagtgatttcccagcctcggcctcccaaagtggaagcggcttatttttaaggagaaaactcccgtggaaaggaatcagcacctcctctgtcaacatttcacttctctgaaaagactctcacttccaacagaaagtgctttgtaacacaacaatgaggctgggcgaggtggctcatgcctgtaatcccagcactttgggaagctgaggcgagtggatcacgaggtcagaagttcgagaccagcctgaccaatatggtgaaaccccgtctctactaaaaatacaaaaattagttccgtgtggtggcgtgagcctgtaatcccagctactcaggaggctgaggcaggagaatggcttgaacccaggagatggaggttgcaatgagccgagatcacgccactgcactccagcctgggcaacagagtgagactccgtctcaaaaaaaaaaaaaaaagaatgagaacatatggacacagggaggggaacaatacacacaaacaaaatttagaaacaggtgaaaataattttagtaatatttttactaatactgatatgctcaaaatattattatttcaataagtaatctaaaaattattgagatgtcttatgttcttttcatcatactaagcctttaatatttggtgtgtattttacactcacagcacatctcaatttgcagtccccatgtttcaagcactaaataaccatgtgtgtccggtggctaccatactggacagcgttgatctgaaatcgcatctgtatgcatcaccagcatatttgcagagatccccatctcagcagcacacctgaggctcatctgcgaaagcacctgcaacttctctacaacctcccacatcacctccaaacacatcctcatgtcatctgcaaacacacccatagctcacaggccaatgcctaaatatcattgcaggcaccttcagagaaagcacttactaaaggggtatacttgattccacatctgctttgacctgcaaatctcccttctcctttacatacatttgcatctcatttgtatgtcaatctaaatccactggcagagcctcagatcatcatctcaaagtcaggtggatgtggggctgggcaggcctccaggtgttcctcctcctgcttcctctggggctcttgatcctcctcctcttccttgctgctctcctcctcctcctccaatatggtgaccagttcctcccgcagcgcccccatctccagccccaggctgcacagctgtcccagcagctggacatccactcggcgcaggttcccctgccagtaggaaggggacgtcacagggatgccaccccagagagcaaggggtctctccaggacctgggtgagagcaggtcccaactcatgtcctggccacagcgcctgggcagggtcctcactgtgcccatggaccctaactgccttcctgcttctcagagtgtctcttgatctctaactcttctctttgtctctccatttcattgtccctgacttctctctctctgtctcctccctctcttatctatatctgtccctgtttccctttgtctctgtccccatttattttttgtctttccatgcccctgtctctctgtctttatgtgttgccatttctctgcccctgcctttggctctctttctctcgcttgccctctctctgccctccccaactttctcaaattcagtctgtctctccatctctgttcctgctctccgtctctgcttcccacctctgtccctctcttttgggatctccctgtccccacctctgttcccgtccctcactctatgtctgtctctcggtgtctgtacatgcctctcatgtctctgcttctatctctcagattctgtttttcgatctctggccttctctatttttgttcatttccattcattctcatttcctctctttctctttcccttccaaacccctcactcaccagctcctccctgatccacagcagactatcgcaggcacctccagtgtctgcccctgcagtcctgagggtctgaccagggatttccactggggagacctccctcagggcctgggggggtgggcccagccccggaggcaccagtccagcctgattcagctgcctccacagttccatcgtctctgagctatggctgcaaggagcaggaagtagcaaggtccagggtggcctggtcccctggggagctgtgtgcgtggtggagagtaaagggcagagggagtgggatgggggttcctgggaaaggtatcccaaagtccactcttcagagagaatcagctggccttgtgcttttctttttccttctgaagtctaacctcaactctgctcacagggttcaaacatagcctcttgcagaggtctaactccacccttccctgcctgtctcaggcctgacccctcaggggcgctcagtgtctgtagatgcctggcaccctctgtccttccacctgccccccaccaccacttctccagcctctcctcagcctccatttgacctctggcttgcccatagcttggtccttgcttgtcctcttggcacgggtcatcctagggctttcccaccagtgtgcctttgggggcaggaatggctcccaggggcaccaagacagcaatcccttagctggagtgcctgtgtccaggctgctggcctagggccaagcagccaattctgctgaccctggacttgcctatgggtatattatccctgttgagggtgagggcttctgctgtggaaaagtctgggaagcactgcaggcctctctcggccttggacccttccttcagacccaaggtgcatatatatacatatatataatggtagatcacgaggtcaggagatcaagaccatcctggccacatggtgaaaccccgtctctagtaaaacacaaaaaattagccgggcatgctgccgcgtgcctgtagtcccagctactcgggaggctgaggcaggagaatggtgtgaacccaggaggtggaggttgcagtaagccaagatcacgccactgcattccagcctggcgacagagcaagactccatcttaaaataaacaaatgaacaatatatatatatatgtattttgttttttgagacagagtctcgctctgtcatccaggctggactgcagtggtgcaatcttggctcactgcaacctccgcctcccgggttcaagcgattcccctgcctcagcctcctgaacagctggggttacaggtgcacgccaccacacctggcgaatttttgtatgtttagtggagacggggtttcaccatgttagccaggctggtctcaaacccctgacctcaggtgatctgcccacctcggcctcccaaagtgctgggattacaggcgtgagccaacgcgcccagccccaagtcccttttaccatagaaagtaacatagtcacagtgcccagggattcacaggtatggggagagggttcgttattcagctgccacacccaccttcctaaacctgctgcccttccagtttcctcacgtgcacagccacgcccgtctgcttttagtttctcaatctgttggcttaaccttcaaaacaggcccaggatttgagcacttctcaccattccctctgccccatccccattcatctcttgcctagactgctacagcagcctcttttactggtcccctgcatccacccttgccctctaaggcaagggtccccagtccctgggccaaggaccagtaccagcccctcgcctgctaggaactgggccgcacagcaagagatgagcagcgggtaagtgagcattaccgcctgagctccgcctcctgtcacatcagcagtggcattagattctcataggaggcaaaccctattgtgaactgtgcgtgcgggggatctaggttgcctgctccttatgagaatctaatgcctgatgatctcaggtggaacagtttcatcccaaaaccatccccaccccacccccgacccccagtctatggaaaaattgtcctccacgaaaccagtccctggtaacaaaacggttagggaccgctgctctaaggtacattctccacctggcagaaataatctttacaaaatgtaaatccgattttgacactcccttcttcccactgtgaatagaataaaaccctaccaggcctgcaccgtcagcccctgcccacctctcaacccagtctcctatctctgtctgcaagctggttcccacctcaaggcctctctgctctagaggctacctctccctgcagcgcttttcccctagatctttgaatggctctttccttatcattcacttctacttcaatgtcacctcttcagagaggcctttgctgatggccctacacccagtcacttttttttatctgcttctcatcaaaattgccttgctgattcctttgtttcttattcatcctctcccacatccatcctctcccagcccagaatgttgacttcctgagagagggactgggtctgtcctgctcaccatggtaacctcggcatctagaacagtgcctgccatcacgtggtaggtgctcagtaaatattcttggaactaatgaatgaataattctatccacaagacttcacaatggctcttcatgctgcgatctagctttcaactccaaactggtcttgagatctcacctcagtctctaaccttgacatctaacctcttcacccactctcttacctgaccctaatttttaaaaatgacgtggtcagcttttcagccccctcattccctgtttttaggaggtagtgagtggaagctggaagaataagaaagcttggggagactgcaattgcagtcaggaaagaaaggtactctgccgggaagaacaccccatcttctcctagggaaagattgtggagtcctggggtttgttttgtttttcaattttttgttttaagagacagcgtctcgctctgtcacccaggctggagtgcagtggcgcaatcacagctcactgcaacttcgacctccccggctcaagtgatccccccgcctcagcctcgtgagtagctgggaccacaggcgtgcaccaccacgcccggctaacattttattttttgtggatataaggttgccctatttctttgtggagataaaggctcccctatgttgcccaggctggtctcgaactcctggcttcaagcgatgctttcgcctcggcctccacaaagtgctgggttcacaggtgcgtgagcccgacctgtgtctcgttttgaagctcagggagagggcgctgtgagcaatccctaaaccctttaagagtaaaaagtgcgtgcacctttaagaggacggttagaaaacgcggggcgtggccacaggagaataagttcgcgctgaaccaggagcgtgggataagaccggccccttccggttacgaaaccttagcaagatggcggctccctgggcgtccctgcgcctggtcgcccccatgtggaatgggcgtatcaggggcatccatcgcctgggtgcggcagtggccccagagggcaatcagaagaagaaaaggacaatactccagttcctgaccaactatttctacgatgtggaggctctgagggattacttgctccaaagggagatgtacaaggtgcatgagaaaaatcgatcttacacctggctggagaagcaacatggtccatacggcgcaggtgcctttttcatcctgaagcagggaggcgcagtcaagtttcgagacaaggagtggatcaggccagataagtatggccatttctctcaggagttctggaatttctgtgaagtgcctgtcgaagctgtggatgccggtgactgtgacatcaactacgagggcctggataacctcctccgcctgaaggagctccagtccttgtcgctgcagcgctgctgccacgtggacgactggtgtctcagccgcctctacccactggccgactcgttgcaggagctctcgctggccggttgcccccgcatctccgaacggggcctcgcctgcctccaccacctccagaacctccgcaggctggacatctcggacctccctgccgtgtccaaccctggcctcactcagatattggtggaggagatgctgcccaattgcgaggttgtgggagtcgactgggctgagggcctgaagtcagggccggaggagcagcctcgggacacagccagccctgtccctgcctagcctttagccctgtccccactcacgtggcttctcagcgggctgcatggaatgtctggtagctcaccacacttctggcttccatttgtcttcactcaacgtcagggtgggggagtggtgctggccaatcacaggagagagcgtgagttcccagtatttattcctggctgcccttggctaaaggtcacagctcctgtcaccctgtcaggcagccctttccatgcccctgttcaggcctggggaggtaaaggctcaggctgttagtagccgcagagagccacactcaccttgtcaggagactcttctcaaactgtccttatgtgagtgcactgccatttcttgcagggaccctgactgacacaggggctactactgacactttacagggatggttctcccccgtgcagggccgctgtgcccactgcaggacatgcagcatccttcgccccactccactcactaaaggccagcgcaccccaggccccatagtattgctggttatggatttattgactttatgttccaaattcagctttttcagttggctgttttttgaaaggggataagctttgtcagtagagggcaccgaacaggcattataggaggaaaggcgcctccttcgtggttcttgttggcctccactgaggcacctctctgggaataacgttccccagcaccccaaatggatttccagtcaattcagaagcattttaccagtgaagccctcattattccagttcactgttaaagccagtaattctctatattaaactttccctgttcggtttatactccggagtataaaccgaacaggggtggccaagctgctgtgggccgccgccgtgcagaaccgctggaactcacgcttggggcgacggctacagttggattttgcccctgcaggcaggttcggtgtcgatactggcgttgatagcgctgctgccgtttgacgtggcgaatatgggcttgtttctcggcctgatcgccgtgttgtcgtagttcgcagccacccagga

SEQ ID NO: 735298 - DNA, 188378 bp, Homo sapiens
ctccaaggctgagggatgaggagacctgctgaggacccagggccttatctttccatcccactccataggtcccagtattgactgatgctgtcttcacctcctagcctcacttttaaccttctggcacccgcccaccactgtccagttcactattgaagccctgccgtccagtgctgcagagggaaaggatgttcttctactggcctgcaatatttcagaaactattcaagcctattattggcacaaggggaaaacggcagaagggagccctctcattgctggttatataacagacattcaagcaaatatcccaggggccgcatacagtggtcgagagacagtataccccaatggatccctgctgttccaaaacatcaccctggaggacgcaggatcctacaccctacgaaccataaatgccagttacgactctgaccaagcaactggccagctccacgtacaccgtgagtgattcccccatacctctgggtgctggcggtcagttctgcttcacacacatgagattgtcaggcctgggctgtgcctgcatccccctctgcattttgtcccgtgttgagatttgggcatttagtgcaggacacacacatggtaggtaaacttcaacagatcagaattcctttcctgcatccaggccctgcagacactgatggcgggggcgggggggcctcagcagggggaggtcagtctcagccaagcaccccatgccctccccatgaacctgaccctgagaaagaccctggagaactgggtcagggcctggcctgagggcgtcctgggaacctcacaaaagcccagcctcaggactcctgactccgtgtgaccccgggaagcctgtgtcagggctggggtgtggtctcctgggcagggcttactgggagcaaggatttaccagatgtctgcgggctgtggttcctgaagcttctcatcagtgagggctcagctcccagagtctcatctagacaaggacagagcctaccactttccctgggactcagcctggagagggcagggggacaggattactagggcattggccccctgaatgaggagcttaagagatgcccttgggcagtcagtggcccaggggtaggaacagaggggagaaaatgttcctggcagcttcttgtccaccggggatcatgcccaggggtgctctcccatggaggcaaataacagatgctgttgatgtgaacacctcctctgtgccaagcttcatgtcagatcctgtgaataatttaaagttcattcacagacaaagtggcaagcctcagaccattttccatttacatattgtatggaggggaaactgaggcacagagagatacagacaccggccacggtgggcagatcgcagctggcagagtcacatgagggctgtctgcagctgctgccacgtcctctccttcatccctggtgccttactaggtgtctgtggaccttagaacagccactggttcggatgttttcttcttaggtgtctacagctcggagggggagattctggtctggagagttatgagtaaatacagaattaatcagttttttcttaactaaatcacctgcctcaacaatcagtcagtgctggggaagttcaggcctcctcgctcaggtccacaccccgcatctctggacatgaaatggcttcgtgtgttttctgatgtgtgggtatcattccaacaggaggataaaggggaggactttgctttctctccccattcacaccctgcaccagccagggcccagtgtgagacacatactccgtagttctctcatgaaggagggagggaatgaatgaaggaatgatctataacctcttcagagacagagacctggatacaagatcctaggaggttctgggcccaacgtgagacacacactctgtagttctcttatgaaggagggagggattgaatgtaggaatgatctataacctcttcagagacagagatgtggatacaagatcctaggaggttctggccacacctgttttctgtccctctagagcctaagacccatgtctcattcatctggcccgtttctcctaaatctgcccctgggagctgagtctcatctgaccctggggctgcagggctgtgggaaggttttcaggggagggatcaggcttgcgggtagtcccacacgtttgccttacaccctggagctctacctggttctcactatgaatatcccataataatcccccctatcctttctggggagtagaaaaaaagtaaatatttaaaaatatgccagagcatctgttcttcttagcaagttcagatagttattagttagcaggaataaatcgttattttaccagagcctcacctgctgggggtttatgggagcctaactgactgaggggggtgggaaatatccaactccagccccctctagccatcatgtcccacctaaaggagagaaaaaactgagaggcacttgtgacattcacagcccagggcacagactctatccaggaccacagaacccctccctccccccactcaccaccgcatcactgaacgcctgctcacccaagttcctgttgcccagtacatcatgtcctggctttcaacaaaaactacaagacagactagaggcaaaaaaaaaaaaaaaaaaaatgcagttcgaaagacagaacaagcatcagaaccagatgcagatgtggcagggatgtggcagggatgttgaaattatcagaccaggaatttaaaacaactctggggccaggagcggtggctcatgcctgtaatcccagcatttgggaggccgaggcaggcagatcacctgaggtcaggagttcgataccagcctggccaacatggcaaaaccccgtctctactaaaaatacaaaaaattaggcaggcatggtggtgggtgcctgtaatcctagatactcggaaggctgaggcaggagaattgcttgaacctgtgaagcggaggttgcggtgagcctagattgtgccactgcactccagcctgggcaacagagcgagattccatctctaaaacaaacaaacaaaaaacaatactggctaatatgctaaaggctgcaatggaaagcatagacaatgtgcagaacagacggatgctgtgagcagagagatggacaggctaagaaagaataacaacagctactatatctatctatctatctatctatctatctatctatctatctatctatctatatatatgtatatatatgctagagatcaaactcactgtaacacctggatctcagagtggttgtgaggatgtttattaggagattaaagagattaaagcagagttatacacagggcgagagctcaactgatgctatcaactagtattcttatttttttgatgttgttattggcaataaaatcaggaacaatgcagtaaaaatttggttttatcatgtacgagttctgtgaccttccttgacttactgaggtactgtaagtctcagattctaactctgcagatggcggtgatgcccctctccctcaaggtgatgtgaggatgagatgagctgtaggtaggttggtgcccactgtgcctggcacatggaaggcccctgaaaatagtcaatgaacatcatccccgctcatcagcatggagttgacagtgagggctcgctctctgtgacaatcatggaatggaaaagaagaaacaagaggaagactgggcgcagtggctcatgcctgtaatcccagcactttgggaggccgaggcgggcagatcatctgaggtcaggagttcaagaccagcctggacaacatggcgaaatttcatctctactaaaaatataaaaattagcctggcatggtggcacaaacctgtaatcccagctacttgggaggctgaggcaagagaatcgcttgaacttgggagatggaggttgcagtgagccgagattgcgtcagtgcactccagtctgggtgacagagcaagactccatccaaaaaaaaaagaaaaagaaaaaagcaacagagggaagaggtgtgacatgagaggaagaagggatttaaaggtacaggagcagggcgaggtgcaagcacctgtgggagaatgtaggagttggtacatcccagtgtgtcaagtctgagacacagaaaatggtgcaaccgtggagagcaagggagtcagctatgaggacagcccaacagaccacactcaggctctggagcatttccttcctccctgactatgcccctgccctgcaatgccccttatggtttcccttggaacaaacttgggccttgtcccctttgccttcccctttctgcagaaaacaacgtcccaggccttcctgtgggggccgtcgctggcatcgtgactggggtcctggttggggtggctctggtggccgccctggtgtgttttctgcttctctccaggactggaaggtaccgcagcttttccccagcctcctcccacccctaggctgaccccagtcagggaggagggagaccccgccctgtattcagggccaggctttccgcatcctcccaaggaatccttccctctcattccatggctcctcccttgccagctgctgatcctaggctgcctcttcctttatgaatgtggcacagttaaggttgcacccctgagtgctgtcctagttccctaacacagcaaagccacagctgcctggagggaggaagggagggagggagggagggagataagacgggagtgctcagaacctggtaccttctgctgttcattgaatttacccacccagtgaggagggatttgcaggcttgagatccatggtgggggtcctgggcatggtcacgcagtggggagtggcaaagcctggacaggctgggtagggtcagcaccccatcgtgattgatgtccctgaggtgtgagatgggagaacctggacctcaggacctgctgtcctttatgtctcttgccaaggggtggagagagagaggacaaggccattgccccatttcagcatctccaggcctgaaaggagggtctggccatggcagggatactgagttctgggagaatatgatacatgctccttgcctccccatgcccccagctcccccagtgtcctgcacacacagccggccctgctttccctctggggccttgacccttcctctcaggcaaacgcaggtggtctgattccctccctgagtcctcagtccctttcctgggtccctgggtcaatgttctcctcacccggcatctgcctgggggggtccttcctctctggccaggacagacgtgactgcttaaggcctatcctcagctccccgtcctcggccgctcctaccacgaaactgatggagacaggaggccttcactccagtccttgaaaatggagtcccttccttgtcctttattctgcccctaaacctgtgatttctccctgcaccctcatgaataatcctgacctttcctagggccagcatccagcgtgacctcagggagcagccgcccccagcctccacccctggtgagtgtcccttcagcccaggtgtgggagcccctaggcctgccctacggtgtccactcctgccagtcaccccctgggggcctctgaccctttctttggggctgcaaggaggatgtcaggaaacatgacacaggggaccccgactgtcttgttcagactgatctgtgggctctgggtcgtgggtcacctcctcgacctcagctgctcaggtctcccctgggaagaggctccctctccctgattctctgggagctgaggacccctacactctcctgcaggaggggcccaggctctcctcccaccctgctgctcactcctgtctctgtccccaggccatggtccctctcacagatccaccttctcggtaagcctgttccctccccagcccttttctactggggtcccaacagtgcaggctcagggcagggggaccatcaaccccacagcacagcactgacccacctttccccagaacagtcaggtcaaagtgagtgcctccagccaggatccgggcctctctacagggccaggaccacccacgccatgtgctgacccctccccgggaccctctacacctgaggagaaccctggagtccagcaggtgcagaatggacactgggaccatcagtcagaggcccacattaacaagggtgcggggtgggcccagccaggacaggggtcagggtgttgtgtccacactgggaggctgagctcaggggcagagctggtcaatcctgaggggaaatgagtggaagtggaggcagggaagtaagtcctggccgatcagagacaggaaccttccaggctgggcttccgtgaccctccctccctgtcccctgacatctcctctctcccctgcccaggcccctctacccagccccagaacagccactcccatctatgaggtgagtgtgggccatggatgttctggtcccgcaggctccaggggacccaggatctgcccccaccagcacctggctgagctcagattcaggaaaatgcagtgaaaatgagaacaggtggtggtgagcagaggagggaggggcctgggaacagggaccccctgagcacagccaggttcagccccagagaagccctgggtgggcccagagcctgggagatgccagacactgttctgagaaggctacaggggttgaggcctcttctctgtttttacaggaattgctatactctgatgcaaacatttactgccagatcgaccacaaagcagatgtggtctcttaggttcctctgggagctgctcttgtgggttgatggagcgtccccaaagctcccagccctggggacggggaaggacatggagcctgagccagagaaccagctctgagtcctgaggagacacaggcctggggacagggagggatgggagtccctgctgaatatctggagaccctgacaggttgccctgggctctgggtgggccgggacaaaggcctctcatcaccacaggaagcgggggcttgcaaggaaagtgaatgggcctgtggcccacccggggtcaccaggaaaggatctgaataaagaggacccttcctctcattggctctttttctgctcacgggaacttagcagaaactcacctgaaactccgtgtccattctctcccgggtcacacagggaaaatatctccaccttgtctcaaccacagtctctcttccctgggaggcagaaataggggttgggagtcaggctggggtgggccctacacaggaaagggcaagattcacatgagccctgcccagccagccgagcgctcagctgtcctcacactaccccagggaccaaggccatgcacagccccagcctgggtccctctgtgaatgcatgtggggtctcaggagcacagaagatggggccatctgatgtccacaaaaggtgagcaatgcgggagcaaccatgggtggtataggttgcggctgtggcccctacgcagcctccagtgtcctgacccctgctgccctcttcacccaggccctggaggcccagtctatcactgtcctccacaaatgaacttacctgtccccaaatccaggatcctgtgtgcttatacctggccactaggttctcctctgtcccagtggctactgctcaggacatctttatccctggtggggcacagagaggggctgtcagagcaaccaagattaatacagacgcataattcagtccttgagcactacccaggactctggcccctcattgctcatcagttcccactttaccccctggcatggatctcactgagcaagccaactctttacacaggagcatccaggtcagaggtgcaggactcccccatctaaagctcatgcaggctcccatggcgatgggacaacctgtctgctcctctccctggcccacagccctatctcgcctgcagctcctccacacacctgggacagcagttctcagcccttccctgagggcccctggaagggtgatgatctcatataggttcacttgaaccaggtgccaccttcccacaagtgagctggtgcctgcactaaagcacagagccacagttcccaagagtgttctgccactgccacaggtcccaagagtgttctgccactgccacaggttgttcgtcctgagatgagaggtaagaaaacaacccgcaatgggttgttttatatcgggatttgcatcaggatttagctctaaatgacccctgatcccacctgcacacagcgtcagatgagacaaggtgaggcctctttagttttctgttgaggctgtgacaaattaccacaagcttagtgacatagaaacctgaaccaaagtgcccacatggctgtgttctttctagaggctccagggaagagtgcatttcctctccttttccacctcctagaggcctcctgcaaccttggctgtgtcctctttctccatcttcaaagccagcagcacagcatcttgaaactattctgtgccctgcttccatccccacatctccacctcctcccacctccctctctcacttaaaaggaaggagccttgtggttattttggacgcacctgggataaaccacaacaacctccccatctcatgatccttcctttaatctgtaaagtgtcctttaccacgtgacatgtccacagatctggggatgaggatgtacacatctttgagaggcccttgttctgtccatcactcctctcaaggccatcttctcatcatcgttcactacaaactacacatgggcacctggatgggttcatcatgactgtggcgtcagttcctgcattaacatccccagcaccctccagatcctgagagagggagacggagggctctccatgcccctagtacctctccaccttcttcttggtgacatgcttagttgctaagaataacagaaagcggaggtgactgaaagatcacaactcaccggcccttcaatagttcgtggacatcagcaccacggacagtgactcagtgaggctaatttccaggtggcagcagggagcatgcagataggagggaactgcaggaaaagctgcccattctattctatatgagaaagagtgtaagaaagaggaagctattacagggataatgctattcttctctaatccataaattgcgaaacctttgcatgtctggatatcatggtttttagcacatctgctgccactccctgcagggctgattgctgcatccaggatgtggtctcttggggggctcacagcctgctttggcctcatggtgagtctccctgcccctgacactcaggccactgtctctgcctacaacatggtgggaaccttccatgattaacgtctgattctctgtgcctgacctttgaagcacatccatcactcagcctggagcatccgctgagctcagcatcctgctcctccatccccagctgagcccttgaggagatgcttgagaggatctcctgggctcctctgtgagctcctccaggctgagccttgtgcttggtgtcagaggcctttgccatctgcttgttctttccataggcaaataatcctcctcagggacaagtggggcctgaagatctgtctgaatatctatctatctatctatctatctatctatctatctatctatctatcatctatctatatgtatgtatatatgagaatgctttattaggcaaaactgcatactatgaacatgctttaaaatgcaacaggatgagatgtgaagacataaagaacaagtgtgtagtgacacatggctatcagaacacactgaagaatccacaccgcggccgagagcagtggctcacgcctgtagtcccagcacttttggaggctgaggcaggcagatcacttgaggacaggtgttcgagaccagcctgaccaacatggtgaaaccccatctctactaaaaatacaaaaaatttagccgggcctggtggctcatgcctgtagtcctggctgttcgggaggctgaggcaggagaattgcctgaacctgggagacacaagttgcagtgagctgagatcgcaccactgcactccagcctgggagatagagtgaggctccatctaaaaacaaaacaaaacaaaaagaatccacactgcttccccgcttcactttacccagaaaaggaatgttctaggccacttcctcttcagcacacatccccagggaactaaaataggttcacagtcacccccatcttcctcattcccatcacctcttacccacagaggcatctctggtcctacagatccagccctgccttcaagaggcacaggtccaacccatccagtgtccctgctagtcacacacagcactcagggtacaatggagggcttctgtgctttggatgggaacaaaccccacctcacattcccacacctgagaagccaccagggtcctctctgtcctgtcctcacactcaatgtctgtcctgggtcacccttgtcatctctcctggaaataggcatggctcctgacaggtaggattgaggctttgtcttttcaggagtccctcccactctgagcacatgaaactgctcagctccatgcaaccctctctcaccaggggccttgttctctgggtccctgaatacctgggtccatgccatgtacattttaagaaaaatgacagtgactctcaccctgacatcctcacccaaggcacgtgtctgacaagaatcaccaggtgagatacctgtggctccacacacctgaggcttcactgcgcaggggtgtcctcatccctctcctcccacccctagggacagtaagcaccacaggctgccttggaccaccagctccccctcccagacacagcctcagatctatactgacatgctacatggagaggctctgatgaacagcaggtattaggaaatcccaccgaaccaggtgccacttgcggccccactcctcctcatatctgtgactgggacagacacacataacacacctctgttcaccgcccagcccccaaggtcaatcacagtctgcttctcccctagatccactgctccccatgtcttccgtcctcagctgcatcctgggtggcctccttgctgttcttgtaccccagaggcaggttccaacctttgtgatgttgcctgcaatgcccaaactttcccttccccttccccttcccttttcccctcccccttcccctccccttcccctccccacccctatcccttcgtcttcccttgtcttcccttcccttccctataaagccaaacatacccatccacctaccttgtggtcaaagtcatcagcctcctgctccactcagtgttctctgaccctgcatatggaggtggtggcccctcctagaacacccaccactcactgtcagccttgcgtggtaatcacagattttgcaggggttacctgtgttcaggtgtgtcacctgtggaaccagaactcttggaaggactggcagagggagctgcttaggatatctcagggctcctggcatctggtctaccacagggctattaacaacagcacttagggacaaggtggaggatggacggttaagagggtaaatatggatgatgtgtgggcaaagaataggacacaggaacacatgcagtactcaaataattatgccaagaaaggtgaggacatggagatggacattcccatatacttctgatgggactgcagtttagtccctacagcaacattgacctcatcatgtttaacgcgcacacgctctgaccactatcctacttctgaaggcctccctgtgctgtgagctctgagaaggccaagcttgcctgttctgtctctgctaaagccagagaccagccaatagcccagcacagggtacttcataaatacatgttgaaggaatgagctccaggaacagtactccacatggtagagatgtgtgtatgaggatgttcactgcagaaggtcatgtcaatgtgacaagtgacgagcagcctcaaatccagcaacaggggtgtgggtaaaagatcatagtgtagccatgcaatggaaccaatgaaaaaaccacaattagagcaaatccacatgtattaataaaggaggtgccctccatacatgctgcacctaacagaatgttgccaaataagaatgaaaaatgatgatatttgggctgtaaaaactagaagtcagctaaataagaatgcatcgaaagtatttgtgaatgcttacaattttataatgccttggcatccgttttggatggaagttggactttctcataccagaagcagggctcagtcacctttgaaatagtttccagttctccacctccttccagttcctcagtgtgattgatcagatatctgatttatacaactgcctcctggtgacctcctccctatgggacttccggatacagcccgtatgactgccccactgaccccacaccctgcctgctgcagtgaccacctctaattacctggatctcatgtctgcttgcattaaatccaccaattaaaactccctgaggacaatctgtttgaataatattctgtaccctaataaaggccttgacccatgggttccccctctgtcctccccatactgcccctgacctctgtgtgtgtgtgtgggtgtgggtgtatgtgtgtgtgtgtgtgtgtgtcctccagacagggcctgtatcccccaggacctgtaagtaataaatctttattttcatcttatgtctctcgcaatcattggcaagagctctgcatcttaaagatcgcaaatttaagaaattggtgtagtcggcacaatagagtacctcttctgtttagcacaagatatctcggagctgctgaggcttttaacatcctcgccggtgtggctgcctcactggtgaggccgttctgttcagtgcaattcagttgctccactgtgtgctgctgtgttgctgctgtagagtgctgccatgttgttctccccaaattgttaccgagtaggaacctgtaatgtgctcccaaggtggtctaccccatgagaagggggattctccatctagggcaagggctaggtgtgtttctggaatcctaatagggaaggcatccacagagggtgaactccactcctccttagagtgaggagtgacatttcccatttattttccccatggaggtgccatgtattgactttttctttcactgtcccaaggttgagccaaggtgagctatggagaccagggcaagataccatttctgttagcaaagcaaatgggtgacaacgtgtggagaagctgtggttctcctgatggatatagcagagtgccatttagtaaaatcttgtcaggaggctgcccctggttagaccggcagtgtctgtagtcactaaggtggatgcgaattttaggccctgggccatggataatccctgcagacacagccgtggcttcatgtgatggggcaatcccgggctagtggctcccttgtttctgcatttcttgctgtggttgcacaatcaacacctcaggggttgattgggtcaccttggaaagagaaacagctgcctaggaggctggtgcacatggaggccaccctcaattttattctgctaacaagttgtaagattaaaacaacagggggctttgggtaccatcaggaacttgtcaagtaaacatccaaagacagaaagaagaaaaagaaaaagacattaaccgtctagaaatacaagccattttaaagattttgcttaaaagatgcgcttgggctgggagcggtggctcacacctgtaatcccagcactttgggaggccaaggtgggtggatcgactgaggtcaggagttcaagaccagcctgaccaacatggtgaaacctcgcctctactaaaaatacaaaaaattagcagggcatggtggcaggtgcctgtaatcccagctacttgggtggagaatcgcttgaacccgggaggcagagacggcagtgagccaagatcgcaccactgtactccagtctgggcgacagagtgagacttcatctcaaaaaaaaaaaaaaaaaaaaaaaaaagacgggcttgtttcgtcgttgtggagtcatcccagagagaggctactccctagagtcactgaccacctttcctcctccatcttttcctcttatcattctagagacagaaaacaagaatctcagctttaggtggctaacctcaccccccaagaaaagaaactaccactttgattgactacaaatccaagaaaaataaaagagaaactttaaaaagtactgagcaaaccacaggtctagcaaacataatgctagccctaggttacttattcatttacaacaaacccctagatataggaggaaaaaataaaaggtaattaaatatatacacatacaatattttaatataaatatataataaatagttaaattatgtatgtataatatgtaactaaatcaaagtaaaatttcatactttgattctattggaaattcaaaattcatttattaacttatatattaaggaatttatgtaaaaaaagatttttaaaagggcaccaatttgcttttgtgtctctacaacataggatctaatttaactttacatttgctaaatacactaattgacaaatattcatggatttaatcaatactggggctcaaattgtagccacacgtgggaatcccataaatttaaacactctgtccctattatcttgagaagaaaactaaatataaaattgaaaaaaacaggtatgtctcaatttacctgtaactttgcctaaatttcccggagtcatatacccattgctgtaaaacattctctattggacataggtgctctgagacaataaataaaatagaagtgtttttggtacttagacattggcttgacaaaatgggatcccatgaaacctcagttaagatagtgaatacggcccaatgtgagttgaaatggggcctttaaggattaaaacttattacatgaaacctagtaagtaatggggtgattatccatactgcttctccatttcatagcccaattttgacagttgtcaaatctggaaaaaacaaacaaacaaacaaaaaaacccctgggaatctgttgcctcacagagacacaaagtagacatcaaaattgtatatctcagttccagttccaaaatggtggcatagaagcaagctggctttactccttcacacagaaaaccaaaaacaaatatacagcaccaaaattattaccagatatattccagaactcaaatatgaaaatgaaacagttttcagagccacagagaagtgaaaaaaactcccgacagatgacaaaagaatcagatttccccatctgtaatgtccctccctgccccattctgcctggtaccaggtgtgtggaaaattttaccccaactcatggtttctacactgggaaatgtaagatcaatgcgggcaaccagtttctgcacaatcctgggttccctgtccctgccttaacccacaagaagcattgtgagtgcccgaagggagaaatttccctgaggacagtcaaagagtggggaggcaggactaccatctccttccctggaaactctgctgtgtaactcagccaagggagacatgaaatcagactggtgtttcagcagctccatgttgtagtaggtttgtttcacaggtatcctgggcatggacatctagccagctttcccacactgccaggatatcccctttgggacctccctcagttaggaagggcacactctgatcatttactagggccaaggtaaaccctaaaggtaacttagagatgaaaaggaggtagtgacctagcagtaaagaactctaagaaaatctatccaataaaaatcaaaacaagccagacaaagactaaaataaataatgaatccttcaatgtaaagacctggacttacatccacaagaaacagtaagcaggtaaccatgatctccccacatggacaaagtgaggaacaagtgactgatcctgatgagatggtgatgtgtgagctctctaatcaagaattcaaaactgcagttttaaggaaactcaatgatcttcaagaaaacatggaaaagcagttcagaaatttatcagagaaatttaacgaagggattgaaataatttaaagaaaacaaacaggaatcttggaattgagaaatatatttgctgaacaggaaaatttattagagtctctcaacagcagaatggatcagaggaaagaatcaacccaaataagactcccccaaggcataaaataatcgaattctcaaaagtcaagggcaaagagaagattttaaaacagaaagagaaaagaagcaaatggcataaagaagctccaattctgtggcaacagattttcagtggaaatcatacagaccaggagggagtgacatgacattctcaaaatgctgaaaaaatattgacatttgagaatactttatccagtgaagttatccttcaatataaaggagagagaaagtttcctagacaaacaaaagctgagataattcacaccatcagactagtcttcctgtaaatactaaagggtaaatactaaatacttcaatgtgaaagtaaaaaaaaaaacactaacatgcaaaacaaccacaacaacaataacaacatttgaaggtataaaatccactggtgaaattaagtacgtagacaaacccagaatactcaaatagtaattgtggaaagtaatccaatcataactctagcatgagtctcaaaatataaatctatcaaaaacaataatacattttaggaggccaaggttggcagattccttgaggtcaagagttcaagaccagcctggtcaaaatggtgaaaccccatctctaccaaaaaatacaaaaatttgcagggtatggtagcacatgcctgtcgtttcagctatttgggaggctgaggcaggagaattgcttgaacccaggaggtggaggttgcagtgagctgagattgcactactgcactccagcctgggtgacagagggagactctgtcttaaaaaaaaatagctacctgtttggagaaaggtaatataaaatatgtaaatagagacaaagtcaaaatttgcaaaggatgaaattaaagagtagagtttttttggggggttttctgtttctattattttatttgtgatctaagataagttgttaccttttcttctcttgaagatactttgttatatctatgtttttggaagtcttatggtaactgcaacgcaaaaaatctatgatagatccactgaaaataaaaaacaatgacttaaaacatactaccagagacaatcaaccacaaggaagacagtaaaaaatgaagaaaggaagaggggagttacaaaacaaccagaaaacaggcaacaaagtggcagtagtaagttcttacttaaaaatattgaacactgaatataaatggactctattctccaattaaaaggcatagagtggctgaatgctgcctatatgctgcctacaagaaaccacttcatgtaaaaagatacaaatagactgaaagtgaagggggtggaaaaagatatttcatgcaagtggaaaccaaaagagagcaggagtagctatactgatatgagataaactacaaatcaaagactataaaaagagacaaagaaagtcactatgtaatgataaagcgctcagttcagcaagaggagatgccaattataaatatctatgcatccaacacttgagctcccaagtctcccaagtatttaaagcaaacaatagtggatctaaaaggagagatagactgaatacaatattaattaggggactttaacaccctgctctcagcaatggccagatctttcagacagaaaatcaacaaggaaacttcaaagttaaactacacactagatcaaataggcctaactggcatttacgggacatttcactaactatctaactgttacagaattcacattattttcatcagcacatagaacattcttcagaacagaccacatcttaagtcccaaaaccagtcagaataaattcaaaaaagtttatatcacatcaagcatttgttctgaccacaatggaataaaactacaataaatgaataactttctggacacatacaacctaccaagatggaagcatgaaaaggcagaaaaacccaacaaaccaacatgaaactgtaacaaaaggaaaacccaggaccgaatgacttcactgctgaattctaccaaacatttaataagaactaaaaccaattctactcaaaatgctttaaaaaattgaagaggatggaacactttcaaactcattctacaaggtcagcattatcctgataccaaaaccagacaaggacaggacaaaaacaaacaaacaaacaaacaaacaaacaaacaaaaaaacactacaggattgcttgaggccaggagtttgagatcagcctgggcaacatagtcagaaccaatctcttaaaaaaaaaaaaaaagaaaaaaattagccaggcatggtggcatgtgcctttagtcctagctactcgggaggctgaggtgagaggaccaattgagcccaggaggttgaggccgcagtgagccatgtttgtgtcactgtactccagcctggggaacagagcaagatgctctctcaaaaacaaaaagcaagctgggtgtggtggctcctgcctgtaatcacagcactttggaaggctgaggtgggagaactgcttaagcccaggagttcaagaccagtctggacaacatagggggactccatctctcaaaaacaaccaaccaaaacaaagccaaaaaagaacataggccaacatcactaacaaacatagatgtaaaagtcctcaataaaatattaacaaaccatgtttagaaacacatcaaaagagatcattcactatgattaagtgagattcatcccagggatgccagtatggctcaacatatgcaaatcaataaatgtgatccatcacattaaagagaaccaagaacaaaaaccatataatcactccagcaagtgcagaaaaggcatttaataaaagaatgggttgagggagtggagcccatagtcagagcagcagtggtctgggattttggaagtagaaagaagggcagcaccactggccaggaccaccagggaacacccccataggccctgggtgttgtgctccagggagggttccctctggagttattaatcttggtgtccactttgcccagctgcccctcacagggtcagggaggatgaagggaaagcttccttctaatgaaagttcagggactcacagttcctagagcctgtagggagaggaagatcttcgaggaagagcacctgggcattggggcgtttgagaggaagatctatgccaggtccaagtggacaacctgtggactctctctccagggacatacgggtatctgggaatctcctgtagcttaaagaggtaaagacctctccctttagcctgaggactggaggatgctggttcaggtgaatgagtcctgcaggggctggtacaggcctggagggtggtggtgtccagggccttgggttcacccttagcatgattcaggccgggcggtgtttcacatgagcaagagggcctgggttcattgcttcaggacaatggtgaaatctcatggtggaagaaatcttgtccttgccagtgcccagctttcatttggtcttggcccagagtgtcctccctagagaagactcttgtcccttcttcacactgcccttcagggatatgccagccttatgggataagatggggtggagactgtagatgtgggtgggaatctctccacagagtgctccttctctcagcggttgcaccttgtctcagggcttcagcttgaaatctgggatctccaagcccttccctccccagtcctggccaggaccacatgggcagatgcattgtgtgaagtgcatttcatttggggtgtcctctctgcatggcaccctcccgttgattctctttgcgcatgtcagagtgcaggcaccatccacacctcctgctggaggagggacggagctgttgactcctgagagctgatcatgtgttcccaccctcacacacaatcatggtccatcctctgagggacatgtgttgccaccactgtggagatggtgcaactgacagtaacaaacagtaaaatctggtactgaatgggaccttaagccaacaatgacaatgtcattccaaggtgtttcatttttattgattcaatgcaagtcacctgatttcattgactattcacaatagctcgataaagtaaatgcatcatcaccaccactttaaagaggaaaaaggtgcttgggcagtttgtgactactgtggtggctgctgcattgctctctggtaaagccaagtaggtggtgggtgcggcctctgggctgggatgatccaccctcctggtggtggcaggggagccaagctggagccatggcctgtgcagtggtagcagctgaactgaccgctgctgcaggatttgcaagctgttacattttgcgaagccatgaagcacataaaacctcaagtagaacaagtgtttcaaagtctaccaaaatctgccttcagagattattactacagaggtggatatgaacccaaaatgacaaaacgggaagcagcattaatactagataatgaatgaacactagtaatagtagggtaagccctactgccaataaagaaaaaaataagagatgctcattaacatgttatgctcttaaatcacgcagacaaaagagggtctccttatatagtagccacaatcaatgaagctaaagatttactgcaagatcaagctaaaaacagtaggtgtataatgaatttttaacttcatattagtttatgtatatgaatatcaagtttttataataaaatgcctccaaacaaagaatatttgatttagggtttaataacttctaagaggggactcagatgtttcctgtttcacagtcagtctgagagggtcatttttcctggagctgacctgggtggaggcctcacactgatactccccagcatcctctctcctgatggggtttatgctgagcatacagtggccctgggacagctccattctctccatgagtcacagacgctggtcatggaagatccactggataaggttccagagtcatctgtggggcaggtcaggatcacaacatccttttcttctgtgactctggtgttgctgactcagatggggtcggagccactgaccctgtggacaatcagtggaggtgctcaactgaaagtgggctgagggcacgtcttctcctccatccctgggtccttaaggtaactgtggaccccagaccaactgacacaggagctagaaagaaattatttaggaagttagtgagggtaagagcgtccttggcaaggtttcccctttaacaaaaagcagcccaagataattccttttctaacaaagagcagcctgaaaaattgagctacagatgtagatgagcaagatggaagcttgcacaggtgaattccagtaggtgtgccaatagaaaagggctgcctggaagccaggtatgttcaacatggagactccatcctcccttttctccattaccacatgtacagtaaaaaaccaggcaacatggcaccggccaggtagacaatccatctgcatgacaaaagatcagagtggggcagccagcaaatggcacagctggtctaaacaatctttcaccccctgtataaatcagacactgcctcctgaagctcatctataaaaccttctgcatttcactatggaagtggcaacccattttccccaggacccctctctctgtgcagagagctcttctctttctttcccctatgaaacttccactcttaacttcactctgggtgcctgcatcctagttttccatggccatgggacaatgaacctcgagtattaccccagatgaatgatgctgtttcacaatcactggttcagctcccttcttcttagggtttcacagctcggtggggagaataccacgcctcagtggtctggggagtgaggaacaaatgaagaattaatcagattttacttagaacgctatcacctgcctcaaccatcagatccatgttgggaatgtccaggcctcctctcttagatctatacccacttcactggacctgaaatcctgtgtttcccgatgtgttggtgtcactcctatgagaggataaaggagagaactttgctttctctccccactcacaccctgcacaagacagggcccaatatgagacacacactcgctcagtagttctctcatgaaggagggagggagtgacctcgagtgattctgccatctgtagtctgtgtaccctggccagtggctgtatcttcatatgcctcagtttcccctcagtaaaataggacacacaatgagaactaaaaataaaattctaattccccagtgaactgaaaggatggcctcttggccaagcggatcccagagttcctgatcatgacaggatgggaggttacacctcattacagcccctccctttggaagtttagaggtgacaactgactagcattaacgctaaaatcgagatcatgagactgacagaacagactctctgtggccataagataccaaattataaactcaacctaaggtcatgcaggcaagggctaagccacactttcctacatttaaagaataagctatgttctaacacagaattttctttctctctagcggctaaagtaacactagccttcgagataagcaatattgaaatgatcgcggctcatccaccaacactggctaactgacccctgttccaacagccacaactacacttcaattggacaggagactgatttcagtaactttctcctaataagagaccactgagcatggcctggttctgctggtatacagacacggtgcactgagtaccataatgcttgtttcatcttttgatgtataagacctaatttaatacatttaaatctgaattctccaccccaaagtgaacatggggtgcatgtagcatgcatgtttgttgatcacgcatgtgcgtgtacttcctttgtgagtatccatagctccacctataacctgttgaatatgtatacctggccaactcattcagcataaatctatcttccacattcccctcccttgaagtgcctgctattggtctctgctggaggctgcatcttctaccctggggaatggccagcctgcaggctgtaaccctgtgtaagaaataacctggttgggtgcagtggctcacacctgtaatcccagtggtttgggaggttgaagtggtagaatagtttgagctcaggagccagagactagcctgggcagcatagcaagatcctgtctcttaaaaaaattttagggaggagagtgaggatcagaaaaaatacctattggctattatgcttagtacttggatcatgaaataatctgtataccaaacccctgattacatatataacaaacctgcatgcgtatctttgaacctaagataaaagtttgttttaaaaactatctgggtgcagtggtgcatgcctatagttccagctactcgagactgaggtgtgaggagtgcttgagctcgggggattgaggctgcagtgaattatggtcccacctgtgagtagccacttcactcaaacctgggagacagagcaagaaccggtctctaaaaaaaaataaaaatagaaaaataaaatgaaaaatatatgaaataaagtctcctttccaaacgtacagatctccgatttttctgccaacaatgataaatggtcagtggcttgccatgttgtctgtgaattacttttaaaatattcacgatcacctgacctaaaggttggtaccaaggaaccgcctgaatacaccgtctctgattatttgcctccaacagagtgttccctgggcctgatctctggtggacaatgagctgctgggaacatcctctcttctctattcctcccctggggatgctgaccttcccttggagtctcctaagttccccagggcagtcggctaatgtcctagggagcttacctgtcttctccataccaagtctcatgtgaaggacgaggctttgcccttgcccagatgaggctctgggggctgagccctggctggctaccagctgcaagagccatggcccttggacagctggtaaatccttgttcccagtcagccctgcccaagatgcctcaacccagccccggcacaggcttcccagggtcacatggagtcaggatcctgggacaggggactggacaggggtttccagggctgagtttctgaacaggggcttcccaggggtcccctcactccaggatctgacatggtcctacaaggaacgtccatggggaggggacccaggagggggaactgacactgacctccccttactgagcctccccccaaccccatcagactgtccttcctctgtagcaagtgcctgcagggtctggatgcaggaaagaaattctgatctgtggaagtttgtctcccctgtgtgtgtcttgcactaaatgtccaaacccccaaatgggatgtaatgtagagggggacacaggcacagcccaggcctgaaaatcctgtgtgtgtgaagcagaactgacccccaacacccagagctcatgagacatcactgtgtacgtgaaactggccagttacttcttcattcacaagatctgtttttatgacttgtagggtgtaggatcctgtgtcattgttggtgacattctgtatcagcagacatgtattggggtatattgtctctcagcctctgtggcaggtcctggggtaattacttgagttcctagtacatatcctgtaattcccctttgtaccagttgtagccaagcctaaggcagattgtgggtgagtggaagaatctccttgccttctgcagcttcaacagtgacttgggcagtggtaggcaagttccagaaagttaaaagtgaggctaggagtggggagagagcatcagttaatactgggccctatgcattgaggtggaaagatggggccctaggtcctggacaggtctcttcatccctcagccttggagtgtgtgtgtgtgtgtgtgtgtgtgtgtgtgtgtgtgtgtgcgcgcgcgcgcgtgcgtgcgtgtcctactgggccaaggtcagcagcatgacctcccttccttcagtgcctctgaccttggcatttccctgtttggagtccttttccccaggggtctgcctggctccctccctactgccttcaggtcctgctcacattagggcatccttgggagaccccttccctgacacctctagagaccctgggtcttccctttctgacctttcgctgctgtgttccctccagggctcttgtcaatacttgacctcacattctagatacccttgcatgtctgtcttcctccctatgagagcatgagctctgtgagaacagggacttgtgtgatcttggttgcaccccagtgcctgggacaggctgcggactcctgtggatgagctcatgagtgttcccagggcccttcacaacgtgggatttattttccaatggctgaggttgttggctaagagctctgttggagttcaatcaggctggtgggaaaaatattagagatagttatagagatagacacaaatcttcttggaagaccaaaaagtttgcataactttggtaatagatctgactgaaggtggtccctttacctttagttaaacaaattaaagtagtaacaaaggaaggcagagtagtttgtctagccagcttgtttactcatgtgatcttaagactaaccattgatgtgccacaggtgcttaattgctttctacttgggaagtccacaatgtcaattaccctctaacggtgttgactcaagcctttgttaattaatcttactgaataaatatgagtctcactagctgatcaaggccatggtcacaactgtttataggactcagcagggagtctgtaagcggccctgacagactcagctggactggcaaagcaaaatatgtgtgtgtcagtgtacactattcacccgtcccccacagctggtgcccctatatgaggagtgctgccacagagctctgtttagtgtcccttgttttttttcttgagtattaccccaacttaaattgtgattattgtcatctgttttcaacattaactgctcagtgatgattcacttggaaaacattaacaatcgagattgtttcttcactaacaacctcagattatttagattttcctgttgtaatcccttcttcctgtttagtgtccaacagaagccctctgtccctctcaggtccccgttctctccaagaaaccccagccagtctctgtgctccctcctcccatccactcccagggagccctcccctcacctgtgagcagaagcgcctgccagggatgtgcactctgtgaggaggggctgagggaggccccatgggctctgctgtctgctttgtcctcctctgtggagaggagcttgggcttcagaaaataaggaggccagaaagtaaggaacaggctgagaaataatggggatgtgtcgaaaggtcacagatgccaacatctttgtcctatgcaatattatccataaaattacaggtttgagatatgcttaaattttcttctaacatgcattaaaataaacatataacttttaatagttatattaaattgtatttaatataaattaaatgctcttgtcagagctactgtgactgtcagctctgctgtccttcctctctctgtgctaagcctcctcccagggcagaagcacttcccagggccaggggtgggggcggggaaaggtaagtggcaatgaggatctgcacaggtagcctttccgcctcctcccctctcagtcctgcctccttgtcttcttttcctctttttctccaatctacatttcagttccttagaccacgctgtgagaagcaaggcttattgggacccccatcccttaacaggatgacctgtgctccccataagtgacctctgctgtgtctagggattggctctgtcagcacctcacagagagtccctggggcccccaaactcagtgttattttctctatgacacagaaacccctctgggtatgcaaggttttcctcatgttttctaatgtctgggaaggttggatttactcccagcagggaggtcacagagatgtccagggagtggggtcctagaaatggacaaatctagagctaaagcccaggtctacgattttcagttgtttttttctgcagtgctatgtgaccctaatttcctaggagtaactaaaatgcaaacctcagacatttgtagacattttatgatttttctctacagcttgtaccactgttattattatttgctttatgctttttcctaaataaatttactttacaaaacatccttgtcctagtagggtgcaggggctcacgtctgtgatctcagctgcttgagaggttgaggtgggtggattgcttgaggacgggaatttgagacaaaacatctttgtcctatgcaatattatccataaaattacaggtttgagatatgcttaaattttcttctaacatgtattaaaataaacatataacttttaatcatcatattaaattgtatttaatataaatttatatacaatacatttttatataataaattatatatataaatgtatatataatagtttttcttttttgagatggagtctggctctgtctcccaggctggagtgcagtggcacgatctcagctcactgcagcctccgccttctgggttcaaacgattctcctacctcagcctcccgagtagctgggattacaggcgcctgccgccacgcccagctaatttttgtacttttttagtagagatggggtttcgccatgttggccaggctggtctcaaacacctgacttcaggtgatatgccgcctcggcctcccaaagtgctgggattacaggcatgagccaccatgcctggcctatatattttatataattatataaagttttctataataaattttatataataatatataaaatggatatttatttaagataaagttattagttttatatatttacatatatttaggaataaatgtgttactgtgggagcccagtgcccaggcaggtagtcagtacatgatggttgtcattagggttaatactttggaattctggattttttcccaagagagtgtctacgctggaatattgggcttgtggctttctgctgatgtgcatgtgtgaagaagctacttccacttattaggacttgtgtatctgtctcgcagtttcactacctattttctcgtgatgttggtcaagtcgcctaacttttctgtgcctcatttacctaatttgtagaatatgggtaacagtacacaagtgtgagtgtgtatttcccaggactgaccactagagggcgtgaaggcaccggcacttactattacagcaatgggtgtagtagtgctcatggtcgtaaacatcattctcccatgaaaggaaccagggcttcctgggagaaataactgattccagggctggggccggaaagcacaagcggagcctggagcatctcgtgaggccagaaagtaaggagccggctgaaaaataatggagatctgtcgaaaggtcacagatgccaaccagaaggagctttgaatgaccaattttgagacaaaatgagcactataagaaataatgatagtaataaattccaacccataaatacccatgagttcctactaatataaataaataattgaatacataaatatataaggatgaagaaacagctttttcttacagcagaattccaattaatgaatgtagaaggaatgatcaaatagaaaatcactatttggctaacagcacagtcaattgtttgtaggcaagaattatcaatggactttaaatatgaatgggtaaaagtatgatgatgctacaactagtgagtaccaagggggaaaaaaaagtacgttgagaagaaacaggctacttccatattcccaaagtatcacttcaggagctacttattgattataatgggacaaatagtaacttacagtagagaaacctggcaacagagtctctccgaggtacaaaggctctcttcaggaaggaggtaaggggaaggaagaagaaaacactgtcctgcctcaattatttgctttccccattctcaagtgtacttcatagacattcaaagatatgtgttgatagtgtccacgatccacatggctctattatagtcatttattcacacatacattcagtgaggctttgagtgcctaatgtgtgcctgatatttgctagatggtggatgctgagaagatcaggtgtgctgctgtctctagggtgactgaatccacctgccccactttacagatgtggaaattaaagtgaaaaggatttataggattagttcactgtcacaaggtcactagccttaaagttacaggagtaaagcaagtttcctgacttgctagattttctgctgcaggtgctgacaatggtgagctccaataggagagaggacactcagagtgaagtgggagccctgaacaccctggattagccaagaggacatgccgggtccagctgtgaccgcacaaaggaccattggggatatttgtattctctttttcacttagagcttgaaatgaggaaaactaagtgcagaaaaccaagagtggaagatttttcacaaagcactggtaacatgcatcagaaaaccctgtgctgatgtctgtcacggtgtttctcactgaacggtaatagtctggctttgagtgtgttccctctacagcctggagttctgcgaggcagggaccaggtgtgattcatctttgtctctccagtgacagtacacagcaggctctgataaatatttcttacaaaataaaatggaataaaaagtagacatctgcacaggtgtgggatgactgagcagcagcagaagcaggaaaagtcagcgtccccagatcagctgatgtggtgttcggattctagataggggtgaggtgccaggatggggatgggggtcctgtggctctgctgccctgggggacacccctaggtttcacagtgcctgctgtggttgctgcactttgcttccccatgggaaagtgatcagagggtgtggggcttcaggtgaccccatgtgggaaatggccaagggaaggtggggtgggcggcacatggttttttttaaccaatatttgaaggtaggttgtatgaaaaggtgttaggcttatttcagcttatggggagtaggacagggattggtgagtgtgtatcaggtatattttggctcaggatggaaaagaactgtcacagtaacataaggtcttttgggaaattacatgtttactggcagagttcaggccagggctgggtgtctgaaaatacctgtcagggtcacttttatggttacaagggcagagcttggcttggaaccaggtttcttactaataccacatattaagtattataaaaactgtcctttgcaataggacattgctctatgatgcaggttgaggtccctctgtttaagtaattgtgggtggctgtgattctctcatctagtctgcgacttggacttcacctccatctgcagtccctctcctttgctgttgacactggtcagagttaagcgcatttactgacgatggtcacagggtggcagcactgcctctctggtattttctaaaacctcttcctggaactgagccagtctaagaggatgtcatgactaagaaaagggcactaatgaggtgaacagataattttttttttcttgtttctcctgtgaagtaacagagtggaggtgagcatggaataattgccttttagaaatggaagacaatggagagaagtgtttcgcaaaccttaatgtgttcacagatcccacacagatctttttattcaatacagattctgatttttctggtgaggcctgagattgtgcatgtctaaggagcttttggatgatgccattgctgctggttggcggaccacactttgagtagcaaggctcgaagatcatttagaggttaattctcactgcatctaatttatggatgaaaacaaaccaaggtccagagagagcatatacagcttgcctaacaaagccattccctaagtgcctgacttcttgcatttaaacccagggcttcagcctttgtccagttctcactccacacatcacacggtttgttcactgttgtgaacgacagttgtggcagcatctctttagtttaggaatccagagccccaatttcactaccctctttggtcttggctcatgctgtgacttcgaatagttttgcccttacttaaaatcttcagtggctcttttgtaatcacaagatcaagttcgaatatctctgtctagtgttcatggctttataacatatggtatctctttagtaaccttacctaacttccctgttttaaaattgtctcttgctgccatagccctccttgctccttcctgctccctaacaaactgtgttcacttctctctcagtggtagtgatgatggcatggcctctgatgttagactcatgtaacttctaatcccagatccaccaccaacattggcaagttgattcatctttctgaggataagcatcctcctctgaaataaacttagatggcggttgagaggggtaaataaaataacacacaaacccactctcatccctgagaccctcttcaaaactagcatataaaaatagctatttgaagaggttcagtgaaattcaaggtaacacagagaaggaattcagaatcctatcagataaatttaatagactgaaataatttttaaaaatcaggcagaaattctgtagctgaaaaattcaattgacaaaccgaagaatgcactaaatctttcaacagcagaattgatcaagcagaagaaagaatttgtgagcttgaagagataatatatgaaaactcagagtcagagagacaaaagaaaaaagaattaaaagaataatgcatgcctacaaggtttgattattaagctactcaaagagatacaagagaagggtgaaaaccaacataaagaaatgtaaaaaacaatcagaatataaatgaaaaattttctaaaatgctagctagtttttttttgagacaggctcttactctcatcacccatgctggagtgaagtggcacagtcatggctcactgcaggctcaacttcctgggctcagatgattctcccacattagccttccaagtagctaggactaaaggcgtgtgccaccaggccaggctaattttttgtatttttagtagagatggggttttgccatcttacccagggctggtcttgaactcctgggctcaagtgatccaggagattcactgccaaaaaggatataaccaagtcatatagtcataggttatctaaagtcaatgtgaaggcaagaattctaagagcagtgagacaaaagcatcaattaacttataaaggaaaacctatcagtctaacaccagatttctcatcagaaaccttacaaaccagaaggtattggggtcctaatcttttggcttcttaaacagaatagctctcagccaagaatcttgtgtagagtgaaattatatttcaaaatgaaagagagaaatacagtctttttcaggcaagcaaatgcttcaggatttgtcacggctagaccatcctacatggaatgttaaagggacttctaaatcacaaaacaaaagatttaaatagaacagaatagaacctcttgaaaccaaaaaattcaaatggcctataaaacaataacacaataagaaaacaaagtagataacgatcaacatgatgactggaacaaatattaacattgaatgtaaatgacctaacactccacttaaaagacacagattggcaagataaataaaaaatcacaaaccaaatatcagctgtcttcaagagactcacttaacatgtaaggattcttatagactcaaggtaaagagatgataaaagatattccatgcaaatggaaaccataagtgagaaggaatagctatccttatatcatataaaacagactttaagcaacaacagtaagaaaaagacaaataaggcaactatataatgataaaaggatcaatcaaacaagaagatattacaatcctaaatatatatgcacctaactttggagctcccacattcataaaacggttatgatgagacctaagaaaaaagatcaacacaaaacagtgagggtgtcctgggttttctttttattggacagcagtgtactagcctatcactttcccagtcaggggatttttggtctccccattcccctaccatgggttcatgccaaagtccatattttttattagtgtttggaattggattttttttttttgaggtggagtctcgctctgttgcctaggctggagtgtagtggcacgatctcggctcactaacctctgcctcctgggttcaagcaattcttctgcctcagcctcctgagtacctgggactacaggtgcatgccaccacacccagctaatttttgtatttttagtagaaacgagatttcaccatattgtccaggcttgtatagaactcctgacctcatgtgacagggaaacaggcactcagtgaacttcatgcgattgaggagttaatgataatgagagaagggctgtgaggggacagcactggggacaccagagcctgtgacgggctgagttgctgtgccttgggagatgcccttttgactgagccctgggaaggagggggtgtgggggcaggagctgcctgcagagggagtggcctcaggtgggcggccacctggctgcagggaagaggtgacagagttcgtgtgcagagcttggagggtgaggaggaggtgggttgaggtgaccttggtgagggtgaaccatggggggctgtgggccctgctgagggaggccagccagccctggacctacagggtggtttggtcttttttgtcccattcccagcatccactgagtggtgaaactctgcaggccagggaccatcccactggccagaaggagcgcacagtaggtgcccactcagtgcatgttgggctggacagaacctcactctgccccctgcccccagctttgggagctgcagcaaggtccctccccctagggatctccatgcctctgtctctgaggggtgagatggggagacttcaaagggccatctcagagtgtgggggatagagacgcagaagtgtgggggatagagggaggcctgggctctagacccaaaggaccttacacacctcctgagtcttttcaaatggtttcttctgttactttaaaaatgatgtaagtcatcatatttattgtaaatcccaggaatctaatcatgcgtaaaataaggtgtcttatccttgaccccaccccttccccaattaaatttccaggatgttaccactgtttgcagttggtgtgaatctctctttaataatactctgtttatctcacttgtcgttttacgccaaaatacccattgaattatattattgctgaagaccattcttttttttttttttttttttgagatggattcttgctctgttgcccaggctggagtgcaatggtgtgatctcggctcactgcaacctctgcctcctgggttcaagtgattctcctgcctcagcctcctgagtttctgggattacaggtgcacaccaccacacctggctaatttttgtatttttagtaaagacagggtttcaccatgttggtcaggctggtctcgaactcctgacctcatgatccaccctccttggcctcccaaaatgctgggattacaggcatgagccaccacacctgcccagaccattctgttctactgaatcatgtgtggtgggcacctcttatatcaatacatatggattttatcttgtgtttgttattggctcccctttttctcattgcatggctacactcaatgctttgtccacacccctgttcctgggttggaatcttgtgacagaaaatgaagtaacaaaggctaaagctttctaaagtggagtcaggagattgcaagacaattgcactttcaccagcaagagctcaaaccacagaatgttccaatagatttggataaacagctgaagtcagtattcaccagccttcaacatctcaactaggagaaccctaaaattaactaagcacatagaatggaatggacttgtgatttaggattccttctcagccaatgagctgcttctgaaaacaactttttgtggaaattacctgtaaagaaaaccctctcctgtgcttgtcttacagaacactagtcagggctgccctgattcagtggacccgaattgctattatttgtttcctaaacatatggtattttctgtgaccttcatctcaatcttttttttaagttactgggctgtttcccagttttcataatgacgagacattctgcagtgtttcatacacatgtcttttccccatgtggagtattgatccaggagctcattcagtcaacgcatgtttatgaagcatcctgtgccaggctgtgggctggtcactgtcttcagcagagagaggacaggcacagtcttgccttcacagagctcacagctcagggaggctcttagaagtgggatactggtcggagcatgtgcacattaaacatgatgaggtcaaggttgctatagggactaaaccacagtcccaccaagatcgcattgagttcctgtggtagaccagaggtcagggcccctaagatgtcctgagcagctccctctgctcagaagttttggttccacaggtgacacacctgagcacaggtgacccctgcagaacctgtgattaccacccaaagccaagagtgagtggtgggtgttctaggaggaaccgtcacctccatgggcagggttggggaagactgaggggagcaggtggctgatgactttggccagaaggtagggggatgggcaggtgtgcgctcatagggaagggaagagaagggagggcattgcaggcaacaacacaaaggttggaacctgccttcatggactgagaaaagcagggagtccacccaggctgcagctggggagggaagacatggggagcagtgggtctaggggagaagcagactgcgattgaccttggggactgggcagtgagcagaggtgtgttatgtgtgtctgtccccatcatagatatgaggaggggtgaggccgcgggtggcacctgggtcggtgggatttcatagtgcctgctgttccctagagcctctctgtatagagggtcagaatagatctgaggctgtggtctgggggaaggggctggtggtgcttaccatctctaggggtgggaggagagggatgaggatgcccctgagcagtgaagcctcaaggtgtgtggagccacagttgtctctcattagacatgtgttttgcgtgaggatgccagggcctggtggttattactgttgtcaagtttgcatgacaaggacccaggtatccagggatccagagcacagggcccctggtgaggggatgaggctcagatggggctgaccaggttcatgtggtcagagtgggagggactgatggagagacagagcctcaacccctcctgtcaggagctgtggctatgtccaggagagatgacaaggatgacccaggacattgagtgagtcattgagacattgaaggtgaggacagggcagagaggaccctggtgactgctgaaatgtaggatgtgaggagggctctgacccatgcaagttacaggacctccccacccccgagcccacagatgacccttaaattgggcatcctgagtgctgtgtgtgcccagcagggacactggataggctggacctgagtctctgtaagggcagcgctggtctgtaggaccagagtcttctctgtgggtgtgacgtgggcaggaattagcaagatgggggtgacaaggcttggcttggaggatctggtacagaagcccatgggcttggtcagctcagcttctcaggggctcagctggggctggaggagcaggatgctgtgctcagggcatgctccaggcagcgtgatgtgtgtggttccagggtcaggcacgggggtcaaaaattaaccatgaaaagttcccaccttctgtaggcagagaaaatggcctgattgtcagggtcagggagacttaccatgtggccaaagcaggctctcagcctcccagagaccacaccctgggtgcagcactcagctctgcagggtatggcaatagatgtgccaagaaccccaacatccagatgcatgcaaaaattttgcgatatataaaatagagcagatcaagtttccctgcaataacgttgttcctggttgtgtctttttcttgtaaactagacatggacatctttccagcagtctgttctcatctgccaccttcctgctgcagcacctcagaatgaacattcctgagacactgtccgtggtgctgacgaccaagagctatggaacagagtgtgatgtagaatcttctagttacctctgctctcctttcacttttaacaacagagcatcattaacaatgagaaggtggagaggtgttcaggatcttgaagtgacttctgtcttgctctcccataaccctgaagctgctgtagacattattgcagaaactgacaccacagtcaggatggccttgtccaggagcccatgtgcagtttgtagtgagcaaggatgagaaaatggtcttgaaaggggtgatggacagaacaggggcttttcaaaaatgtcacatcatcacccccagcatccgtgaatctgtcacatggtaagagaccttacagattaaatgaaggattatgagtttggaagattattgtagtttatccagatgggtccaacataatcacagaatcccttccttacaaatgagagagggaggtgggagagtcagagaaggaggaggagatgtggggatagatgcagaagacagagcggtgtcaagatgctgcactgctggctttgaagatggagaaagaggacacagccaaggatgcaggaggcctctaggaggtggaaaaggagaggaaacgcactctgccctggagcctccagaaagaacgcagccatgtgggcaccttggttcaagtttctgtgtcacttagcttgtgggaatttgtcacagcctcaacaggaacctacagaggagtcaccttgtgtgcaggtgggatccagggtcatttacagctaaatcctgatgtaaatattgcaggttgcttttcctacttcctatctcatggccaacaaccctggacaatggcagaacacccttggaaaccacggctctgtgctttagtggagggaccagcttgtttgtgggaaggtagcacctggtccaagtgaacctacatgagatcgttactctccccagggccctcagggaagggctgagaacagctggcccaggtgtgtggaggagctgcaggtgaggcagggctggaggggcctgtgggtccaggtagaggggcagacaggttgtcccatcgccatgggagcctgcacgagctttaggttggggaaccctgctcctctgacctggacgctcctgtgtggagaggaggcttgctcagtgagatccacgccagggggtaaattgggaactgatgggaaatgaggggctagagtcctgggtagtgcctgggaggaccttgctcaaggactgaattcttggtctgttcccaccttggttactctgacaacccctctctgtgtcccacggggataaagatctcctgagcagtggccattgggacagaggagaacctggtggccagagctaagcatccaggatcctggatttggggacaggcaagctcattgctgggggacagtgatagatacggcctccagggcctgggtgaagagagcaggagggctcaggacactggaggctgtgtggaggtcacacccacgatctgtaccacccatggatgctcctgcattgctcacctttgtgtggacatcagatggccccaacttttgcactcctgagacatctcatgcattcacagagggacccaggctggggctgtgcatggccttggtctctagggtagtgtgaggacagctgagcactcagctggctgggcaggactcctgcgaatcctgccctttcctgtgtagggtccaccccagcctgactcctaaccccctactcctgtctttccagggaagagagactggggttgagataaggtggagatatttttcctgtgtgacccaggagagaatggacatggagtttcaggtgagtttctgctaagttcccatgagcagaaaaagagccaatgagaggaagtttcccctttattcagatcctttccaggtgaccccgggtgggccataggcccattcactttccctgcaagcccccgcttcctgtggtgatgggaagccttcgccttggcccacccagagcccggggcagtctgttgaggtctctatatattcagcagggacccccatcccttcctgtccccaggcctgtgtctcctcaggactcagagctggttctctggctcaggctccatgtccttccccatccccagggctgggggcttcagggacgctccatcaacccacaggagcagctcccagaggaacctaagaagccacatctgctttgtggtcgatccagcagtaaatgtttgtgtcagagtgtagcaattccagtaaaaacagagaagaggtcttgacccctgaggccttctcagaacagggtctggcatctctctctgggcccacccagggctactctgggactgaacctggctgtgctcagggggttcctgctcccaggcccctccctcctctgctcaccacctcctgttattttcactgcagtttcctgaacttcagctcagccagatgccagtggggacagatcctgggtctccctggggcccaagggaccagaatatctgtggcccccactcacctcatagatgagagcagctgccctggtgctgggtaggggaatctgggcaggggagagaggggtgtcaggggacagggaaggattcctgctgtgtaggaattccagggctctcctcaggtgatggagggtcccagggtggggttagcacagggagtggatgatcctggccctgaacagaggcccagctcatggccagggcaggtctaaccttatccaagtcattctgggtagggtgggtttgtgctggggattgacagtccccctgccctgagcctgcacagctggggccccagtggaaatgggattgggaacggacagtcttacctaggagatggagctgtcagagggtccatggcctggggacagagacaaaagtgagcacgagagtgttaggatagctgggcccctcctgcaagagtgtgtgggggtcctcagttcttagagaattggggagagggagcctttctcaggttattttaggggtcaagtaagcaagtgaggttgaggaagtgacccatgacccagagcccggaggttagggctgacccggccagttggggtttcctgtgtgatgttttatgggatcctctttgcagccccagggatagggtcagaggcccctgggtgtaactggcaggagtggacaacttggggctggcttagtagttcccagccacacccagactgaagggacactcaccgggggtggaggctgggggctgctgctccctgaagtcactctgatcgctggccctaggaaaggtcagggttatttgtgaaggtgcaaggttaaaagtcacaaattggagttaaaataggggaccaggaaaggagcctatttccaagaggggtatggagacctcctttctttatggagttctgtggtaggaggggcccaggtgaggggagttgaggaaaggccttacaaagccacatctgtcctggccagaggggaaggactctcaggcagatgctgggccaggagaacattgatccagtgacacaggaaagggactgaggacccagggaaggaatcagaccaccaggggttgcctgagaggaagggtcaaggcaccagggggaaagcagggccaggcacatgtgcaggacactgaggggactgcatgcatcttggattctcctggaactcagtgtccctgctgtgaccagacactccactcagggctggagatgctgaaatgggacaatgatcttgtcttctgtctctgccctttggcaagagacataaacgacattccaggatatgccatattggggccccggttctcccttctcacagctcagtgtctgcagttaccatgtcagtcaaaggggtgctgaccccacccagcccgtccaggctgttccagtctccactatgtgataatgcccaggatcccccctcagatgccctctcactgggtggatggattcagtgaacagggggaggtaccaggtattgagcaccgctcccccctgctccaggcagctgtggctttgctgtgctaggaaactaggaccatgctcaggggcatggccttaattggactgaattcactgaggacaaagctgttgaggaagcagcccagggtcagcagctggtgaggaaggtgccatggaatgagagggaaggatccctggggagtcgggaggctggggagagcctggcactgaatacaagacagggtctccttccttctcgcctggggtcagcgtgaaggatgggagcagaatggggaaaagctgtggtacctgccagtttttcggaggagcaggaaacacacaagtgcagccaccagaagactcccaaccaggaccccgatcaggatgcctagagtgttgtcatctgctgaaagaagaaggcaaaggggatgaggtccaaatctgttccagggggaaccatgaggggccttgcagggcaggggcatggtcagggaggaaggaaatgccatggagcctgagtgtggtctgttgtgctgtcctcatagctggctcccttgctctccgtggttgcaccattttctgtgtcttaggcttgaattactgggatgcatcaactcctacattctcccacaggaagcctgcacctcatcctgctcctgtgttttttagtccctccttcctctcacatcactcctcttccccctgtttctttttttccatcccatggcagtcgtaaagggcaggcccttgctgccaactcaatgctgatgagcagggatgatgttcattgactgttttcaggggccttccacatggaaggcacagtgggaatcaatctacctgcagcttttctcaccctcccattgccttgagggagaagggtatgtgatattgtgaaatacgtatttggtgttcatcaccattgatatggttaggctctgtatccccacccaaatctcaccttgaattgtaataatccccatgtgttatgggagggaccttgtgggaggtaattgaatcatgagggtgggttttttccatcctgttcttgtgatagtgaataagtctcaggagatcagatggtttcataaagggaagcttccctacacatgtcctcttgcctgctgccatgtaagacatgcctttcaccttccatcatgattgtgagacctctccagccatgtggaattgtgaatcaattaaacctctttcttcatacattaccaagtctcaggtatgtcttcattagcagtgtgagaatggactaatacagtaaattggtaccagctagtggagtgctgctataaagatacctgaaaatgtggaagtgactttggaactgggtaacaggcagaggttggaacagtttggagggctcagaagaagacacaggaaaaaagtttgaaacttcctagagacttgttgaatggttttgattaaaacgctgatagtgatatggacaataaagtccaagctgaggtggtctcagacagagatgaggaacttcttgggaactggaacaaaggtgactcttgttatactctagaaaagagattggtggtattttgcccctgccctagagatctgcagaactttgaacttgagggaaatgatttagggcaactggtggaaaaaaaattctaagcagcaaagtgttcaagatgtgacttgggtactgttaaaaacactcagttttatgtatttacaaaggtatggtttggaattggaacttatgtttaaaagggaagcagagcataaaagtttggaaaatttgcagcctgatgatgcaatagaaaagaaaaatccattttctgaggagaaattcaagccagctgcagaaatgtgcataaacaatgaagagcaaaatgttaatccccaagacaatggcaaaaatgtctccagggcatgtcagagaccttcctggaagccccttccatcacaggactggaggcctaggaggaaaaaatgtttcctgggccaggcccagggctcccctgctgtgtgcggcctagagacttggtgccctgcatcccagccactccagccatggctaaagagggccaaggtacagctggggccatggcttcagagggtgcaagccccaaaccttggcagcttccatgtggtgttgagcctgcaggtgcacagaagtcaaggattgaggtttgggaaccttcgcctagatttcagaggatgtatgaaaatgcttggatgtccaggtgaaagtttgctgcagaagcagagccctcatggagaacctctgctagggaagtgttgaagggaaatgtggggttggaaccccgacacagagtccctactggggcactgcctaatggagctgtgagaagaagaccacaatcctccagaccccagaatggtagatccactaacagcttgcaccatgcacctagaaaagctgcagacactcaacgccagcctatgaaagcagccaggagtggggctgtaccctgcaaagccacaggggtggagcccaaggctatgggagttcagctcttgcatcagtgtgacctggatgtgagacatggatacaaaggagatcatttcagagcattaagatttggctgccctgctggattttgggcttgcatggggcctgtagcccctttgttttggccagtttctcccatttggaatgggtgtatttacccagtgcctgtacacccattatatctaggaagtaactaagcttgcttttgattttacaggcttataggtggaagggacttgccttgtctcagatgaaactttggacttggacttttgggttaatgctggaatgagttaagactttggggaactgttggaaggcatgattagttttgaaatgtgaggacatgagatttgggaggggtcgggtggaatgacatggtttggctcttcttcacccaaatatcaccttgaattttaataatccccacgtgttgggggaaggacccagtgggaggtaactgaatcatgggggtggattcttcccatgctgttctcatgatagtgaataagtctcacaagatctgatggttttagaaaggggagttcctctacacatgccctcttgcctgccgccatgtaagacatgccttttgccttctgccatgatttcaaggcctccccagctatgtggaactgtaagtcaattaaacctcatttttaaaaaaattacccagtctcaggtatgtctttatcagcagccaagaccagctcggtcgcggagatcctaacccagcagtgctagaggaattaaagacacacatagaaatatagaggtgtgaagtgggaaatcagggttctcacaggcttcagagctgagagccccaaacagagatttacccacatatttaataacagcaaaccagtcattagcattgtttctatagatattaaattaactaaaagtatcccttatgggaaaccaagggatgggccgaattaaaggaataggttgggctagttaactgcaacaggaacacgcccttaagatgcagattgctcatgctattgtttgtggcttaagaacgcctttaagcggttttccaccctgggtgggacaggtattccttgccctcattcctgtaaacccataaccttccagcttgggcattagggccattatgaacatgttacagtgctgcagagattttgtttatgaccagttttggggccagtttatggccagattttggggggcttgctcccaacagactaatacacccattttctggtatgtgactctaaagtccttagaatcttcaaagtgatgtctttttcaagctaataattgactgatgactggcagcccctaggcaacttcagaatgaggctggtcactgacccaggtaggattagagggttgggactttcagcctcacccctaatccctggggagggacctggagtttgaattaatcaccaatgaccaatgaatcaattaatggccaatgattgaatcaattaatggccaatgattaaatcaatcatatctatgtcatgaaccccaaaaggactgggtttgaagagctgaacccatggaagtttctggagtgtggtgcatctggggagggcatggaagctccacaccccttcccacatgccatgctctgtgcatctcttcatctgcatcctttgtaaagtcctttattacaaaccggtaagcctaagtatgtgtttccctgagtcctgagagctgtttgagcaaactaatccaacccaaacagggagtcatggaaacctcaatgtgaagccagtcataagaagctctggaggcccagacttgtgactggtgggaaggtggtggcaattttgtgggactgagccctctgctgatatgtccaggtagatagtgtcaggatggaattggaggacacctagctgatgtacggtgcagaactgattggctgctgggtgtgtgggagaaacccccccgcatcacatttggtcacagaagtgtgtctgtgttgatgattgttattgtggagtgagagcagaggaaaaacacagtttgagtttttccaaacagggtggaatcccatctgccaatttagaatctgaaacttatagtttcagtacttcaattaagattgaagtacttcaattcagtacttcaattaagattcagtacttcaattaagattcagtacttcaattaagattacagaactggtaagtgaaagtgatacaacaaaaatgtaaccaaagtctgctcaacttaacagctaataacaacaaagttcataaaaataataccagtcgatattgatagcactgattgagccctggctctgtgcatgaccttgttaagggctttaatcgcattaatctctgaataaatatcctcacaaccaccctgagatccaggtgtttgtaacaattctacagatgaggaaactgaggcccaggaggttgagtgtcttgcccaaggtcaaatacctggtacctattgtaaccaggatgataactggatgagtctaatccctgagttcttacccacattgctccccaggctctgaaggaatctcatccttctcattccgtgtatcattttacaccccccctccctcctaggaaaatatacaaggaaaggagtgagaggggccgagggtcactcacattttacagtcagcttgagggggtcgctcctgttggagctgactgggttggagacctcacactgatactccccagcgtcctcctgcctgatggggtctatggtgagcatatggttaaaccaggacagcttcatcctcttcgtgacctgcagacgctggttgttgaaaatccactggaaagaggttccagtgttatttgtgtggcaggtcaggaccacggagcccttctctgtgactgtggtgctgctggcttggatggagggctgagccactgactctgtggatagagtgaccaacagaaagtgtcttggggccatgctgcatcctcagagatctcagagtcaaatttagaacattctcctgtgaataaaggagaaagatgaaggacagggaggagcagagagaaccagagacacccatagcagcgagcagtagggactacagtgacctcagagaccccagggaccaggaggacccagctgcctcagaccaggaccagggagccctgaaaaccctcccacagatgagcggccccagagtcacatgagatgcaatacctggggtggctttaggagcaggcagtcagagaaatggaacatgggtctcagcccctaagggacaaggaagaggtgtggccagctcctcctaggatcctacatccaggacccagtctgtaaagaggttatgattattcctttcttttttcattaattccctccctccttcatcagagaactactgagtgtgtgtctcagttgggccttgtgcaggtacagggtgtagtgggaagagaaagctgagtcctttccttcatcctcccatgggagtgacatcaacaaatcaagaaattcatgatttcacgtccagtgagggaagaaatgtggatctgatgggagaggcttggacaatcctggcattgagtctgatagttgagacaggtgatttcgttctaagtaaaaactgactaattctccatttgcccgtcattcctcagaccagaatctccctctctgagctgaggatgcccaagaagaaaggagctgaaccaacatctggtcctggggtccacagatgccccacggtggtggccacgaccagattctgggctgcagacacacggtggtgtgacgttgagcactgacagcctgtgtgatgctgatgcaatttctctttaataaaatggggtaaatgtcaatggtccctggcttgccatcctctctgtaaattaacattaaaatatttacaattacctgacctaaagcttggcacagaatagctccaaataaacatcatctattattattttactccaaaaaaaaaaaaaaaagagttctctgggcctgattcctggtggagaaggagcggtccagagtgtcttttctctgctttccctcctcctgaggacagtgcacttcccgggacatcttttaagtttcccatccagtttaatggcctgggaagtttgtttgtctgtcctctccactctgactctcaggtgaaagatgaggctctgcccttgcccagatggggctctgggggctgagccctgcctggtgaccagctctaggaaccacggccctgggacagctggtaaatcgttgctcacaatcagccctgcccaggaagccacaacccagccctggcacaggctccccagggtcatctggagtcaggatcttgggacaggggcctggggcaggggcttgaagggctgagcttctctcagaggatcctcaggccaggccctgactgagtcctataagatctttctcaggtcatgtctatgaggaggaggccaagcggggttggactgagactgattttcccccgctgcatctcccgcatcagactatccttcttgctgtagggaatttccacggagtccggataagggaaaggaattctgatctgttatagtttgtctcccctgggtgtgtcctgcactaaatgcccaaaccccaacatgggacgtaatgcagagggggatgcaggcacagcccaggcctgacaatcctgcgtatgtgaagcagaactgacccccaacacccagaggcacggaggaatcactcaccgtatacacggagatggtgagatgcctgttcaatctgagaatttctgtatgtgacttgtagggtgtagtatcccgtgtcctctagggtgacgttctggaaatgcagatctccactgggtgatattgtctctcgaccgctgtatgcaggccctggagtcctaacgtgagtgtctattacatatgctgcgattagctggttgggctccaccgttttccctttgtaccagccatagctgtaaagattctcgggcagataaaccacagagagatgaacattctccccttcagcaacttcaaagggcgctgatgcaataaagagccaggcagtggtgggtgcgttccagaaagttaaaagtgaggctaggaaagggagagaatatcagtcaatatttgacctatgcattggcatggaaagacggggtcctgggtgcaggtctcttcacccctcagccttagagggtgtgtgtgtgtgtgtgtgtcctactgggtcaaagtcagcagcatgaccctcattccttcagtacctctgaccttggcatttccttgtgtgaaccctctttcccaggggtctgcatggttccctccccactgccttcagttcctactcacacaagggaatccctgggagacttctttcgtgaagcctcctctagagaccctgggtcttccctttctgacctttcccagctctgttccctccagggctcttgtcagcacctgacctcacattctagatctctttgggtgtctgtcttcccccccatgagattgtgagctctgtgagggcatggacttgagtgatgttagttgcaccccagtgcctgggacaggctgcagactcctgtggatgagttcatgagcgttcccagggccttccatatcctggggtttatttgctaatgtctgaggttggcagatgaagacagagtttcatgccctggtggtgtttttatttaaattgtcactgtgatatagttttactatcattttcaaaatgtagtggccactgacaatgaacttgaaaacatggaccaactgagattgttttgccccttggcaattccagttcacttagattttttggttctccttagacgctctctcccctgagtctctaacaaaagccctctgtctcctctcagagccccatcctccccaggagaccccagccagtctctgtgctccctcctcccacccactcccagggagtcctcccctcacctgtgagcaagagcccctgccaggggatgcattctctgtggggacaagctgaggggggccccatggtctctgctgcctgctctgtcctcctctgtggagaggagcttgggctccaggaacgctctagacagggttactgtgactgttgtctctgctgtccttccttcctctatgctgagcttcctctcaggcaggagcacttcccgtttatgggcaagggcggggctctgcctacaatgtctctctgtcccctcccctctcagtcctgcctcccttgtccctcctttctccttcctttttgcctatatttggttccctaggcaaaactttgagaagcaacgctgatggggtcctcataacaggacgacccactctccccagtactgacctctgctgtgttctggccttggttctgtcacagccggtagattatttccctttgtgacacacaaaaccagctgggccctgggtctcctcatgctctccagtgctccaggaaggcagaatgatgcccagcaggaaagtgacagaggtggctctgggggctagaaaggggctcactgggtgatggctgggaaggacccacccgctatcttcagtgtcaccagcctggcctctgacccagggacagagacccaggcctggaggtctcgggaggatccccagctcctaggtgtggagggaggtgtcctgtgtgtcctgggaagagaggactttgatggaaggaggtgggaggctctgggttctgctgtccttggtgaaggtttcagggggaccctctccatgtctggggtctgtgcccccagcttaactctcattctctttgcaaatacatatattttgtggatctgcagttgcctgaactgtctcatgtccctaaatctttgtatccctttttacagaaggtcaggaagggtgtgtacatgagtatgaggactatctgatcagggcgagtgtttgtttcccaaagatctctttagatatggtataatacataagataaatgtactgaattagcaattttaagtgtagaattaaatgatactaattctattcacaatgttgtacaaccatcaccataattttttaccagaaaatcttcattataccaaatggaaacttcatacttttaatcaataactccccacttccccctgccccacccactggtagcctctgatactatcaatctctgtgaatttgcctagtttacatgtctcatataataaggaattatatacgtgtattatttttttctggattatttctcttagggtaacacttttaagattcatccacgtcgtagcatatattacagcttctttcctatttatggctgagtaatatcccaatatatgtttatacctcaattttaattcattcatctcttaatggacatgtgggtggtttccacatttttgctattgtgaaaaccgctgcaatgaacttacacttggaagtatctgtttgggtttctgtgttcatttctttgggggtacatataggagtataaatatggggtcatgtggtagttctatgtttaagtttttgagaaacagccaaactgttttccagtttgctgtgctattttatattcccatcagcaatatacgagggttccattttctctacattcttgtaaacacttactatttaatattttttaaaacttatagccattctagtaggtgtgaagtgatagctcattgcagttttgattttcatttccctggtggctgatgaagttgagcattttttcatgtatttactgacaattttaatattttttagagaactatttattcaaatcatttgctgtttaaaaaaaatgggttatctttttattattcagttgtaatagttctttatatattttagatacaagtcccttatggggtacatgatttgcaaaatttttctcatattctgtgtcttctcactttcttcatggtgttctttgaagcacaaacatttttaactttgatgaagttcacttatctatttttaattttgttacttatgctcttgatgtcatattgaagaaaccattgcccaatccaagatcattaagttttactcctatatgttcttctaatggtttgataagttttgctattccatttaggtttttgaaacattttgagttaacttttgtatgggctgtgaggtaggggtctaactacactatctcgcatgtggttatccagttgttccagcacaatatgaagaggctaccattctttccccattgaggaatcttggcacccatgtcaaaaaccaatgggctgtaatggtgagggtttatttctggactcttgattctattccattgatctctatgtgcattcttgtgccagaagcacactgttttaatgattgtagtgttttagtaagttttcaaattaggaagtgagtcctccaatttttttttccagattgttttggccattctggggtgacttttaaaaaagatgtagttcaatggttctcaaagcaggagtggttcagctctccttttttggcagtctggagacctttttaggaccttaatctaagtagataaattattcccactttcttttctgagttgctatgttacagtgtatattgacacccatgaaataattgagagaccctggaagtgcttgcctacatagtgagggacaattagttccatgatcatgggcacagaagattttgttttgggaaacaattttgttggtggagttatattcatgcttactcttttatttgtcttcatagcctgcatctccttcagacttcatatctgtttattttcttgtttgtcctctggggtttgggtgttgggtgaccagtcagctggagctggaggaggtgcttagcaaggcagtgaccctggttgggaggagcagggctcagcagggtgaaagtagctgggccttgagtcaggagtggcatctggaaggcctgactgtaagggtcagaagggccagcaggtgggtgtcctaggcacaaacggtggctgctgctgtggactggaggaaggtaagaggccccgagtattccatgttcttactggctccccaactgaggattcctctcctgggctggtgctgtcctgcagcagggaggggttagacagggacggctgcacatcaggccggagtccatgtcatcctcttaggcactgtcactacagattgaggattctgttcataagccaagcctttgcacaaggaagggacccgggctctcaaggaagagcagctcctggtcagacctccatctccttctctctcattgcctgaggcctcaagcttggtctacctggcacaggggtctggatcctcctcccagggttggggtcttactgagctgggcacctgcaggtgggagaagatctggaggggccccatctgccttcaccagattgatgttgagggtccctgagtcctgcaccactatcaggtgctgagcaacttccagtgtcagtgacaaccaccccatggtggaagcagaaccacctcgtgagaaagcacctccaagcctcagtgcttgccatgtgtgggaatttgctggtttcagttgggggcatgttggtgggtggtcatgaattcagggccggattctatgctcacagtgcacatgctggatgtggtacagaccccaggcagggctcagtggggtggttttgggtgtgcacaggtatcttttctggaggagctggtggtgatttggctcccagaagttcctgagctctgcagactcaccaagcactcaatatttgagtgaacattgggcgagagagcagaaggtaagtgtcagggcatcggggttggtgcctctgggaagaggaggaacattctgggaacaaagctctcccccggcttacagggagcttcccatcgctcctgccttgaggatcagggaaactagggcctctgctcttccaggggctgcttgcaggcagtttgctctgggagggggtgacccaggagttgcctctcattttgcatttgagatttaaaaggagaagggacagtatatcttgccaggtcacaaaaattacaggcatcatattgactgaagggcactcctgtcatcactgcaatataccagaatggtcttttaaaaaaataagtgatttaggtttaccagcaactgtaatgcttgttttattcttctagttcaccgttaatgtcacttttgtagttttagcactggcaatgttgattttatgttgactctgatgattttaagctttcatttgttcacatagagatcatcttctttctgaatattaatgcattttttctctatttctactggttattcctgtacatagagtagagaatcacttttcccaaggaggtggaaagcttctgactaccaaaaaaaaaaaaaagtgtcaaaatgctttaaagtcagtaacttaaagatcaaatccaagagtgggcaacagattctgcccagggtctgaaaggtggagaggtgactggtgaggatgtttaaaagacctctcctctctactccctaaatgggggccatccagtgttcttgaggttcagagaaggcccagggctggggcagcagggcactgtcagctcccagctcccaggggccaggagtaagaccccaacactgtccagacactgattgcattcattttgggggagagtagattcttatttaaagaataatacaaaagtctacaaatatgaacataaacagaaattcctttgctacaattttccccttaataagacattccttcctaatgacatatgtgactgcattcatggctgagatgttttctaggatggtgagagcatcagagtggactatctggtgccttggggtcatgcattttcttcttccaatgtctacaggatcccccatgtcccactttgtagtgtaactcagtgtgtgtcattctggtttttgttgtatagatccttggaaagcccatgtcattcctgctgtgaggtacaggcagccaaatggcatcatctctaaacatgccttctcctggtacatcaaattatggaataaatgaaagccattttgacagatattgaagatataagtttctactcttcccacacatgcttctcccaagtgaaggattttactggtgaattgttattagagattagtgtggatcagtgactctgccaggggaaattttgccctctaggggacatttggcaaagtctggaaacattgttggttgtcagagctgggggagggagtcctgctggcattgagtgggtggatggtgctgaacaccctgcagttcacagagccccaccagtttgaccacccaaatgtcaatgctgaggagtggagagccctgctgtgccctcccgcagcttccctgaagcttcccctcacctgctcctcccatgtctccccaccacttccccacttcacccgcctccttacacctcagtcccctccacctgaactcaccccttagtccaaggccagccctgatctccgctctcctggtctccttgctccttagcaggaggcgcccactagatggcgcccttgcccttactggagctcaccgtctccctttccaccctgagacaaatgtggctgcttttactgccacaaccccagccctccacactctagatttgctcagggagcagctcctggacagacctcagggaccccagggaggagcctcactctggagattttgatggcatggtctttgaacttcactgttacccccagtcaggatccaggatgttgggagtgcatgattctgcccggtcccacttcagcaggaccccactgctgagttgtctgtggggacccgggcctctcatctccttcttgcattgcaggagagggatcttagcactgctttcacataaagtcagataatggaggagtgcaggtgagtttgggaaggtggacatgaagagaggttgtgtccctagaggtggcagcagtgagaggatgggcaggtgggaggaacacagcccatccagggttgccagccatattaggagcgacagcctttcctctaagcctccagcctttttcctgaaacattccagaactttccacttcagcacttcccactgaggctcctcaggtctgtccctgagctcccagctgagcctacctacccatctgaaatcctgagtcctgtgtcaccctcgttccccattattctgtgcagttctgtgggacgcccagctctcctgacacccccagtcttcagaatggccatcagcgctgtcgctgtggcaccagggtgactgccgcctggaggctgagtcctggcttcctgacagctgtggggcccgctctaggctcccttgtcctgatcattcatcacctccaggatgcacagcagctgggccagggggaggagcagggacaggtgtcagccaccctgtgtgtctgcaagtcaggctgggggtgtgggaggacgccaggaatgactgaactttctgatttagagggtgagagcttgcactgatggaatttgggatttaataggaaaagcatagcgttttcctattttgtaggcagggtggctggagtttggaatcatagattcccctgggatgtcactgtggacctcagtcccacccgttaggggcacagatttcagaatccacaccctggggcaaagcaggcatgggaggctccatcagcctggccagggctctctatttgtgcagctgctgcaaggagatgtgcactctgatgggaacagtgctccctcctccttggggggcagtatctagctccctgcagcccctctccctgcaggccctgccctctctgaacctcaccttccccaacccgccccccgcaatcccatctcagctgtaatcccaacactttctcatccattatgggtggactgcttgagcccaggggttcaagactatgctggctggacaatatagcgagttgttgtctctacaaaaagacaaaaattagctgtgcatggtggcatacacctgtagtcccagtcactcaggaggctgaggtgggaggattgcttgagctggggaggctgagttggcagtgagttgagattgtgccactgtatacttcagtgtaggtaacagagcgagaccctgtctcaaaaaataaaagtaaaaaaaaaaaaagaaatatggaatacattattgttaactctaatcaaccatgctatgcaatagtccaccagtaataccagtaatagccaataatgaattatctgaaaaagaatacaatttattcttagctatctactgctaaaatttttaagctatcttttatgatagctgaaacaaaagaagtaaatttaaccaaggaagtaaaagacctttataatgaaaactgtaaaacattgatgaaataaattgaaaaagacacacgcacaaatagaagatattccatgttcatgaattggaagaactgatattgctaaaatgtccttaccacccaaagtggtctacagattcaatgcaatttctgtcaaaacaccaatgatattcttcgaagaagtagaagatcctaaaattagaaaccacaaaaattcctaaaacctgcacaaaacaccctgagttgccaaagcaatcttaaacaaatagaacaaagctagtggcattacacttcctgacaatcaaagcatactgcaaagctatagtaaccaaatcagcatggtcctggcataaaaacaagcacatagatcaatgaaacagaataaaaatcccagaaataaacccatgcatctctagctaactgattttcagccaaggagccacatgcacacaatggggaaaggacagcctcttcaataagtggtgctggggaattggatattcatatgcagaagaatgaacctagaccctatccctcaccatgcacaaaaaattaactcaaaatgtattaaataaagacttaaatgtaagaactgaaactatgaaactactagaagaaaatatagggggaaaatccatgacattggtctaggcaaagagtttttggataaaatctcaacagcataagcaacaaaaccaaatataaacaaacgggatttcatcaaactaaaaagcttttatacagcaaagaaaaaaaaggccagcagagcaaagagacaacctacaaatgggaggagaatatatttgtaaatatatacatatatatttgtaaatatatacatctgataagaagataatatccaaaatatataagaaaattatgtttctgtatagttttatctgactgggatacagaggccacatccacagtcccatcctcaaaggccacttgttcccaaaatgtcaagcacatccctcaatgatccatcatcaacacctatgtctgtaggatgaagggtgaatcatgaagcactaaaaaggaagaaggaagccaatcccaaaacaaaatgatgcagggtctggaaagtccaaagcattttttttttttttttactgcatcttcctcctttcttctccacattcccaatcctcactattgattaacaaaacaaaaaaaactgggacccaccatcttccctactgtcaggagatctagcgagattgtttgagtcttagaccaaactttgccataagccaaatttctggctgactttacaatgatatgagctagcacagtctctttttctgccagtcaacttgtgctcggttttatttgcaaccaaatagaggtggtaaccaaatataggtgaccctaaaattagtcatcaggatgaaatcctaaaatgtgcaacaaactgggttgaattcaggattagtagcaacatctctgttgtgggcttgaaaagggggcacccttttatgcagtagcaaaattgctaaattgttgtttgctgagtctttggactctcatcccggattttctatgaccattcaaacagggctgcaatgaacatctatggttgtttagcttggcacacttctacatttctatatagtaatatctagaagtgcatttgctcaatcacaagatatgcacattttataattgactgctatcgaactaccttaaatagccttaatttgttctcaacattgtttaacagggtctgtttaatgtcctacgtccagcaaggacagtatcacttttcttaatatttttcaaattattggaccttaacaaatacttaatgtgcaattaattgattcctttgtattcccatgccttcttttatatgtttccttatagtacacaaaaccacattattgtttctttacttgtgtcattccaccctggaccattcctatctaaactataacattatgagagagagagagagagaaaacaatatgaaaatataaattgattaatcaaaaaaatttaaataggacaaatcaggaagacacaagagagattttaaaattattcagagaataccacaatagctgtaccaatatattttaaaacttagatgaaacggacaactatctcgataaatgtaaattaccaaaactgactcatgaaaaaatggatattatgaatagagcaataatcagtaaagcaattaaaaagacagttgataatttttatttactgacaacaataacaaaatttcaggtcctgatatttttatggtgaattttaacaaattttcaagctcctcctcaaccaattctcagaaggtttaaaactttaacaagaaaacactttctaacacattttcagaagctgttatagcatgataccaaaaccacacaagaaaattatagaccaatctcacttacaaatatacatgcaaaatcaaacaaaatcttagtgaaccaaattcagaattaataatagcaaacaagcaaaatatgttatcatacgtatggcttatatcaggaatgcaagtatgtttcaacatcagaaaatacttctccacattaacagactaaaggagaaaaacgcttgtttaattatctcaataggtttttagagaattttgaaaattttataaagttatgcgtattctgtaaaattgatgaaatccaaccttgatttatttttaaaaattgcctttcctatagaattataggtaaaggaaacacatgcatcctcacagagctacttcaaggctaagttacttcccataagtaacgtatcctgtaatgtgtgcttggcacatattcaatactaaacaaatatttgcaaatcctcaaaccacttctcgctcaaataacccacctttgtcttttgcctttatgttagggttgattttctcaattgtatcttggagatcctttggtgggtctttcagcaattaccctgaatttgcttttctgtttacaattttaattcctgggaactctttcttgttctctgactgcacccttttcatgagagttcagccatcaatcctccagaaccccaccccccccgcccccccaaaaagcaataaagatgtctaaaagcttccttctgggctttcgaatgatgtttaccccaggcatttgttctattcgttcatcacccattttccctacaacttgcctacacttgatatcagatttttatttattagtcacctatcttcttcattggcccattttcctattttgccactggttgttctcaaatgtgttatgattcctggttgtacagtcaagtggttgataatcttggatatacgataaagatttgctctgtagctgtgtgtaagcctatataaaagcttttgtatttttcttcttaaaaaagacaaaagatggttgggaagatccctccagttcaccagttcgaggctgcagtgagctatgatagcgccgctgctctagcctgtctgtctgtgaaaaacaaggggggcggggggcgggggggaagactggagatgtaaatctcccgcagggccctacccgtatccgcaacaggtctctaacaggaacagcctcaggcctgtgttggaacaaggtaggttacagaaatctggaagccagatctgtaacttcagggtaaggactggctctcagggctgatcccccgggctgggtgtcccagaggcacccgcccccgccccttccccaaggcaggccaggacaccttcactcctctccttaggctccccacccccttctcctccccactgtgcctcctggagtagcggtggcggtgccacaggggagcggggcggggcgggctctgagggcaagggggatgggccccgccggggtcactggcggccaccctggaaactcgacgcaggccggcccttctagtgaatcgtcccagccacagctggcctcccagccgcgcttggggcgcctcggggcgcgaatggtgcaggttggggagactcaccacgcaccgtcgggggtcggtccggttattcctcaccgctcggctccagtgggcgcgcgggcctctcctcctcagttcctgcgctgcagtccctccctcacccttcgcagcttgggaatccaactgtgtcattccgacggagcgccgtgaggacctccgagggtgttagcgccaagtgatctctgtccagcgctctgaatatccaagtaaaggagttcaatgaagggcgggtcaacggaggagaaaccgtgactctctcaagggagcccaaggcctccttgtctaattagtgacgcgccaatggatggaggctcttcccaccatctcttcccagcatccagtgacaccaccgccaagggacgggctcggcggaacctgcaggaaagaagcatcggctgagcctgactgcagcgctgtgaagagacaggggaggggatcagtagttggtcccgcgcccaccccctgtttccgcgaggggcggagttgactggccatgcaggcagagggcgaaatgtgaaattccactactcctaccgtttttccctgacccgatggggcggagtgtcgtcaggctaagttccctggcggtaaggtggggagattgaggcgcacacctgccgaacggtaacgcaggattagctaaggcgagctcaggacagaagcctcccgaggagcaggagggcaaaataataaataaataaataaataataaataactcactccttggtctttatttgcggcaggaattcagaaggtgaaagcggggccttaggatctttctgaccttttgggttttaagcaggaggtgtcagaaatgttaccacagggctagctggcttgtggccagcaagcgttcacaatgccctcgatttttcatccctctctgtgggttctttttttcattgtaaggcagaatttctacgattgctcacccactcagagaacctgagctggtttagaccaggtgagacaggctaggtttaccctggtgatgatgtgttgttgccatggcgatcctgcccagtaccagaggccctgcagattcagatgcttggtgcctgtgcttggctgaggggccaatgggtgaagctgccatctgcgggatgatgactgaagcctctaagtcagaatccgcccaggctgagccttagggcagctccatggagcctcggctggcctgggatagagagtccaccactgtgccagcccccagccactgcctaggtcctgtgctgagagccccttgtccagggaaatggcgtccagtggaaaagggaccacccccttgcccttcactcaaggcaggttggtgacaaccctgaagctaatccgttcctagaggagctgcttctgggtccgagttttctctgcagcagagcagctccctggatgggatctgttcaaagtccgcctttcacgcggaattttccgtccttgcaattttccacctccaccactaggggatcctctctgaccgcctcatgccggctctggcctctgagcaggggtttctcttctgcatgtgcgaccttgcgcatgcctagtggccttttgggacctagagctgctccacaccccgatggggttacagagtgcctcgcctccactccaccccaccagggttccttccctggctgggatgggatttcagaagcgccgaggaacagcccagacaggtgtgggagagtagccaaggcccctgtcccggggtggccaggacagcggtggcctcgcataggacctggctgggctgctgcaatcagtgtcctgccccttggagagcaacagtgaaaacaacaagactatcttcacccaccttaagaaagaacagaaccagtatccccaactctgctgtgtatcccaacccaattccattccccaccccactctcagtagccaatatgcaaaatattagaatactcttactgttattattttcaaccacactctgcatcctgaaaaaccatatatttcgttatgtgcttttaaacttcttgaaaatgaaatactgaggctgggcgcagtggctgacacctgtaatcccagcacttcgggaggcggaggcaggcggatcacgaggtcaggagatcgagaccatcctggctaacacagtgaaaccccatctctactaaaaatacaaaaaattagccgggcgtggtggcgggcgcctgtagtcccagctacttgggaggctgaggcaggagaacggcgtgaacccgggaggtggagcttgcactgagccgagatcgcgccactgcactccagcctgggcgacagcgccagactctgtctccaaaaaaaaaaagaaaaaagaaatactgaattttcaaatacttgctttttttttcggtcaaaattatgttctcaaatttcactcctgtagatgtgcgtggctggctgtagtttttgcatttttattattaggtattctcctgttgcattaatatgccacattttatttctctcatgtttttggtgaccacttggggtgttttttggttttgtatttttgctgtatacatgctgccatggtggacatacctctttatacatatttcctgttgtatgcagacacaattttaggatgtgacatcttcagcttttctattgtgtcgtgtgtcttttccttcgtgctttgtgttatttacatattctggacacagattctttgtcaactgtatgtgctgcacatctctttcccagtttgtgtcttcttcttcttttttttttcttaaaaaaaactttctttatagtgttttttttttctttctttctttgttttgttttgtttttttgagatggagtcttgctctgtcacctaggctgaagtgcactggccgatctcggctcactgcaacctccgtctcctgggttcaagtgattctcctgcctcagcttcccaagtagctgggattacaggtgcctgtcaccacacccagctaatttttgtatttttagtacagatggggtttcaccatgtttgtcaggctggtctcgaactcctgacctcaggtgatccaccctctttggcctcccaaagtgttgggattacaggcgtgagccacagcacctggcctgtgttctttcttaagtagatgttacttttaatataatagaatgtatcatattttgcttttatattagtactttttctatctaattcaaacacatccccaagggtctttgtgtgtagactgaccaatttctcaagaatcatgaatgaatactgcttctctttccccaatttatctgtaatgctacctttattataaagtttctatgcatgtgtagaaatagttcctgatttttcactctgtgccaccagcataccaatagcacgctgtcttaaatattaaatagcagagctttatgagacaacttgatgtgcagtaggcaattgcccccttgttactcttcttcagggttctttgttgtaccacatgaattttagaattggcttgtccagctaaaagacaactgcaaggattttatttggaagttcataattctatacataatttggggaaagtattttcataataccaagtcttcctattaatgaacacagactctctctctctctcccccacccccacctgtttagttatttatatctttatggtctgttagttattgtttattgtctttcaaccaggtttcatgtttttctacatagaggccttgcatgtgaaagtctttcttcctagcttgctattacaaattttttttaattgcactttttgggtacagtggcttgtactgtaatccccgatacctgggaggctgaggcagatggattgcttgagtccagaagttcaagaccagcctgggcaacataatgaggtccctgtctcaaaaagtttgttttaaaaattgcatttgctgttattcaacaaatgtcattgtgtctcatatatggatttttatatctgataaccttgttcaacaatcttttgattctaacaatatatcagattcttttgagttttccatatagacaataatgtcatctgtaaattataattgtttcttctttgttatttcttggaccttttattttatatttttgtcttgctgcaaggcaatatccctctatatattgtggggtcttttttctcataaagtggggatggtgaacacccttgtcttgctctctgattgtataaagcatgctttctgtagcattttgtagacgctcttttttagattgaggtaattcacttttatttctggtttactgagtttttagcataaattcaggctgaatttgagctaaagctttttctggagacatcatttgaaaaattcatatgatttactttctttaagtcaccaaagttatgatttacattgaactgagtttctactgtttaactgtattcttgggagaaaacccacttgtcactgaacaatatctgttttatttactgctgtcttgtgtctaaattttcttttaggattttttgtatatgctcagattagcctgttattctcctttctgtatttttttctggtttgggggtcaaagttataatagcctcacaataagagctaagaaaccagccctaatggaggccggggcaggaggtttggagttcaagaccagtctgggcaaaatagtgagacccccatctctatgaaaaatagaaattagccaggcatggcagtgagtacctgtagtcctaggtacttgggagggtgaggcaggaggattgcttgagcctaggaatttgaggctgcagcgaactatgattgtgccactgtactccagcctggatgacagagcgagaccctgtctcaaaagaaaaaaaaagaagaaataaaaaggaaaagataaaagagctaagcatctgtttccttttttccattttctgggagagtatgtgtaagactgtaattaactgtttcttgaataatgggagaactctgtaaaataatctggctttggtgttacctgtattggaaggatgaaaaataccaattcagtttcattattggttgatagggctactcatgctttttgttttgttttgttttgttttgtttttgagaggaagtctctctgtattgccctgttgtccaggctgagatgcaacgttgttcacaggcctgatcctggctcactacagcttctaacttccgatctcaatagatcctcccgcctcagccttcccagtagctaggactacaagcatgcagcatcacatccagcctcttttcctgcctgacccagttctggtttcctttagttttctaggtgttcatccattttatctaatgtttaatgcatttggcataagggtgctcagtgtcctttcattgtctgttgtctgtaactgttgccattttcattcctatttatgagtactggcgtcttctctcactttttcttaataatcctgctggaactttgctttttaaagaacatcttttgacttgttgattcttttttcatacatattaactattttcttattttttgcctttatatttatttcttttcctgtttgaaacattgctcttttcttactataaaaatgggtaagtagctcatgaattaccacctcttttaaaaatcttttctactgtaagcattttagcagtttacatttgcccacaagtaccacttcagctacaccctatgtgcttttacataaagtcttcatttttggtaagacatattctcaaattttaattatcacttgtttttaaatccatgatgttttatttgaaatgttgtttctaaagatacattttctggttatacttttattcttctaatttagcacagtggccacaaaacatggtctgtgcagtgcatacaatcgatgagtaatttctgagctgtagtatttggcataatatatggcaaaatttcctaagttttccatgtgtgctttaaaaaacttccagtaaaatacataaatctgttagatcaagcttctcacattgttcaaatagtctatatgtttactgattcatttgactgcttgatttatcaattacaggtaggaatgtattcaaatctcctattaaagtgtgacactcaagtggctttttaaagacagagatgccaaaccaatgaatacatgattttccccaaagcctgcacaaattctctaatgaaattttaccatgaaagtttgtttaattaaggcttactaaagcagtatgttgtcttttactttttaaacagagaatatatattttaatacatcgtttaagtttatgattaattatctattactgaggataagaatctttgcctgtgctcattcagcatttgcacttcatttatgatctgccttctcatagcttctgttaatttttatactagagacatttatttgtttgtataaatgttgaaggtttttttttgttgttgttgtttttgagtcagagcctcgctctgtcacccaggctggagtgcagtggcatgatctcggctcactgcagcctccatctcctgggttaaagtgattctcctgcctcagcctccagagtagctgggactacaggcatgtgccaccaagcaaggctaatattttgtatttttagtagagatggggtttcgtcctgttagccagggtggtctcgatctcctgacctcatgatctacctgcctcggcctcccaaagtgctaggattacaggtgtgagccaccgtgcccagctgggttttttatattataaggagatgtaatagatagatagatgtttcaaagatagtcaaatgtttttaaaatttaaaacacttttttacaggttgactttcaccatttaatttcatctatgtgttttgccttagagaaattttaaatgctatgtagatctcatgacttataattatgaagcattttgttttctgttttccacgaaacttagcttaactttgagcatataatagttgtaaaggtaggagagtaacactgaaaaaaggaattgcataaaaatggcacattttctgtagagttgtttatcgcctgaaaataggccccatttcatggaagtaagatgatcaggctcaggtccccagacgaaactcttggcatggtttttggagatagtccagggctcagtactggctctatcatttgctacttctcccaaagtaaccaatatctcatccaccctgagcccatttccatatctctaacatgaggataatagcatctaccttacacaccaagtagagggatcaaatgtaggaactaaatcaaagtaccagcactgaataacctacatcctcccacttcccaaaaggaagagagatgtatcccctgttgacaaacgagaccattttgcaggagagaaaggaaatgccagttcacttgcaatgtaaacatgctctctctttttagggatgtccagggacctgagagagaacccatgcttaccaaagagtttctagttccagacacacaggactcgaagggtgacaagtatggttttcagggtccctgaatccacccagtcctcacagaaactcctaaaagctgtcgattgacagcgttgagttcacagctctggtcctcacatgctgatactgcttgtgatatcgaacccgacaggaccccacatcacaattgatttaccaactacaatataatacctcctgaatctccaaattggctcacccaggaacaaaggcttggggtaaaactggattaggagatataagctctgaattttctgagggtgagacacacaaggattctaagtgacacgccacagagtaacgggtctgtgactggaggacccacagatttgtcttactggagacaccacatgcacacaaactccatccttagctgtggaaacaagggtcttttgctatcttagccgaattctgggagtaatttttggaggggaggagatctttgggattgcctctttcaggccctttacaaaaatacctacttcttaaatggtaaagcttacactaaactgaaaaaattacatccttggctttttatgaagtaggtgttggattgaatcactactggaagaagtatggcatcgcaaattctaagcagtggtcaaaggatggatctgttaaattagaaaaatctctaaatttataaaaagattttagattcctttattctaaacaattgacctatttgtactcatgggacaatcaaatttcaaaggagatatgtaacgatttcatggcttgcattaaaaatccttctgataaaattaaagataaaaaatctgaccccctgccaaaaaaatcttttgaagttcatactgcctgctttcaatattctgtgggattcacaatgaaaggtgccttatattgtggcctagcttcaagtttatgccttcgccaccatggcctgggttcaattcccagtcagggccccagcgcctttggtttaatgtttgcgtggcatttgacttttttacctatttagtattggtgagattacctttggtaaaaaaaagtttaaagagtggaaatcgcaattctttgtgttggctaaaatctgattataagagatctggaaggttttatttttctttttcaaagagctctatggtcagaagtcggcttcatgaaaagctaatatttaattatatgtacatacagtctttctggattttctcttttgcctcctgttttgaaaaatatttggatttgagtgaaactccgttttagaaattaattgcttggtacaatatacccatgtaactaccctgcacatgtaccccctgaatctataataagagttgaaattttgacaaaataaaattagattttgaattaaaacaaataggtgcttggttcctctgctcacttctttttaaaaggaattcctctcccatgtacttcttcttttcccttctttaccttccttttggcatctttggtatcacatgaagggatctagagggaattttaagtgactctgaaattccttgagaaatacacaaaaagatcccactcaccccttttgggggtctcctgttctccttgtggagtccagagtcagggacaggctcctccaggtctgcagctctgctctcttttatttcatcttggctgattgctttggttttgtgagtaccaggcattactttgtactgtgagagacacgtcctttgtgagtgcaacggctgctgggtcactggtgagggctgcagtttggagatggctgagagccgttgcaataaatggttgtgattgcagggggctccttgtttctttgcaagtttagatgagaaaggtgcagtttggacacagtttaaaggctgtgaaaacaccaccaatgaatatgatttcctttggggatggtctgattaaaagtgggctgattgttgctgtgctactagccttgaagacatgtttctacagcattgtgcagtgtggaaaaattgtgtggcttggtcttgtggcatgtcccttcttttagagacctcagattcaatgtgaaattcgggatttttgattttcaaagatctagatgccctgccttccagatgtgcctactcttcacatattttaaaattagatcctataaactgcaaatactttgttggcttctgtgagatcagaggtccagttagaaaaggaagacagtttgttaaaattaaaaactatttatctaatctaactagattggcctccaaatatgactttctgacattcagctggttactctgaaaagatttctaaatctcttgaggctcatctatatgtttccttgcaaagaaaaaaaaaaaaaaaaaaaagcaagcccaagcactagtaagaaaaagatttgcaatgtttcatgaaaggagtagatgagtgaagcatttatttgtagatactgggttggatacctgtgcaaagaagaagaggtcaataataaaaattgccaggggatttcttggaacttaacaagctgaattaaatatagaaatgtcaggaaatcaaggcaggaaatactcacttgtggttaggcagacagggcagggttctgagcttgagatggagcaaacagttgtggtgggtgaagttcacatgctttagagctcagctgtcctagtaaagaagcctaagagtctctaaagctcttatgagaagatggattttttttgcctagattaaaaggttaaagaattgctttaagttggataaaataaagctaaatgtttaagcaagttgtgaaaggtttatgaaaaaattaattaaaatatttttgtgtgtaaacatattgactaaagttgaaggggtataattcagcatttctgtaaattgagcattgaaataaaaacacaatgggtttctcttagagcactaacctgctctttaacaaaaattgtaaagggttatagaaagtctataaaaatgttaccttatggtcaaacattaaaattgggtaaatatgtctatcaggttttattaagaattaggtttaacattaatagtacactaatgtaaaggtgaaatttggcttatttggtacaaaaatcatacaggaagcattgtgaaatataaaatgatttttagctttctttgggctatatttctataaatatgttattgatgagggttccaaagttatgggagactcctataattctgctatatctcagtgtacattatcagtcataattataattgtcatgttaaattattgtgggccacagaggtaacagatttccttgtcaattgtgtctttgactatgactaccctaaaacgttcagtcacccatatacacatgttaccttgttttggccctctttagaaggtaattttataatcagctataaagccctaacaggtgctcttaaatgcaaattttgataactttggagattgtgacatcagaagagaggaaaaatgttcgggacacttggagagctaaaatgttcattgatatcaagcaggacaggaattaactgcatgaagtgaactaataggaggctgaagtgatctttttgactttttgcttaaaacgttgctgatcctttgttttgcttttcagagtcaaggcaaattttcttttgagctattgacagcttttaacgattaatcaaaatatactcctatgaacaccatttggagcattatttgtttctctctacccgatttccccagaatttggaaactatttgtgggtattcttaatttatggcaatatagttatttgcataagtgcaataagaatgtgttttctttggtaacaggacacaatttgaaaaactggttattttaccaaggttttgaccagaatgctgtgctttcctttaaggaatcaaacttgacttgtggagctaataaagcctttggaaaactgaccttatatcctgtgaacacagtccctgtacagggttactgatctgtgggaagaaaagaatgtcacattctgacaggtcaggaatcccaagttatcttgaaacttcaagaggacaggaattcacccaaccatatgtatttgatggtagaaatccatggcaggggctcagctttaaaaagtcttatctcagattccttctataaaacaaagtcccattaaaaccaattttaaaagcctatgtgaaaaataattattcttgctgcacctcgtacaaataaagtggcaaagcataataaagcaaattggtcctgtcgtaatttgtctttagtaaaaacgggaaactggggtcgggtgcagtggctcactcctgtaatcccagcactttgggaggctgaggtgggcagatcatctgaggtcaggagttcaagaccagcctggccaacatggtgaaaccccatctctacaaaaatacaaaaatgagccgggcatgatggcgggtgcctgtaatcccagctactcaaggggctgaggcagggaagcggaggttacagtgagtcaagatcgtgccacttcacgacagcctgggtgacagagcaagactccatctcaacaacaacaacaaaaaagggtaactggagagagggaagttatgtttcaaaaacttttggaaactatagtacacctgtttttaaattctagtctggcattcagtttttattattttctacagtttgggttaaattcgtatttctctggctacaagtctcctaaataatcttttcatttgtttcctttttctttccctttttccccatttttcttaattggaaatcactgaaacctaagctgtgctttcttaaagccctgtgaactgaagactagacaaccgaaacttctgaaggaagtagcagcaacctatttatatgtgttgctgttgcctactattatgttttagcaggtgctgcctctacacccccgaaacagagagtgctactgggaacaaatcgactttttccactccagtgctgcattcggtgccccataacgatgaccccctctcagcaggaagtagccagaaagattacaatgctccatctccctatgattcttgtgataaataaatatacaagcatgatagaaatcatgcgcaaattgacagtggggattgtggcaggccagatttcactaatggaggtccccatcacaactacttcagtactgactgagtggttaagttcagtatcaaaagctgaaagtgccagcgcctttctacaaaggctagaatgtaacaaaagcccaccaagggttttacctaggcctttcctgggccttacagcatgacaaaacaaagaaggaattcttaaccagacctgtttaggattaaacaaatttaattgggggtctgaagaaactcgccaggcctccacaaacaagttcattgggggtctaaaggaaccccccccaaacctctgtgattgagcaggagacaaggtcagggtaattgccccagcacctggactcatttagatttaagtaaatgtactgaggctccagagaaaggtctccaagacttagactagagttacagattaaaagaagttaatcacttatatctttagataaatgcacactgacacgtagacatacatcttagaaaatatataagctctggaaaaccttgtaatttacagttggtctggagatattttctgggccttctctctgtaaccggttccagaaataaaaaactctcttcctccccagtttatctgcatctcgttattgggccgtgagaaatagcagccagaccctgagtttggtctgggaacacactggctgggcttcctgcctggcggtagagcttcactgtcctccttcccagccaaaatgtggcccttgaaggcttcctccccaactgaccggttttgggttctaggtactcagggaacaccgtcttcaaggaggccattttcatactgttcctggtttgatttttctgaaattaggaaatgccccttgaggcatccaggattgtctttatttcccctgaagcttcccctcctgaagaaaaaagttctcaaacaccctcaggactcaaaccccaagttcaccctgtgaaacattcccatttcctaaacccaggcaggctcatggccctcagcctctcagaccccatggaaacctcctcccccacttcacgggttctctccatattgagagcctcccctcctcggcacacaacccagagactcaccccaacatgtgtagcaaatcaccctggaaacaatcatggctgaacgtggtagcccatgcctgtaatcccagcactttgggaggcccaggaggtggatcacctgaggtcgggagttcgagaccagcgaggccaacatggtgaaacctcgactctactaaaaatacaaagttcactgggcattgtggtgtgtacctgtaatctcaactactcaggaggctgaggcaggagaatcacttaaacctgggagacagagattgcagagagccaagatcgcaccattacactccagcctgggcaagaagagtgaaactacatctaaaaaaaaaaaaaaaaaaaggaaaaggaaaagaaaaaaaaaatcatgaggcaacattgcatttaacaatattttatttatcaaaagacacttgtctttctcaggtaagtgaaggtctagagatgaaacgagtcccgatgtaaattgccccatgggcattgctgagatcacaagatcatcactgcagcatgcagcacaatagtaaatttctcaggatggaagttcaacaatccaaaaggtagtattttttttcatgatgctcagtccatcatacgaaataaaaataaattccttttcatgatcatccattcagtagaaaaaatgatagtaaatttgttctcatgaagatttttaccgtaacatataggatttatcgttattattattattctttgttttttgtttttttgaagcggagtctcactctgttacccagtctggagtgcagtcgtgcgatctgggcacactattaacctccacctccagggttcaagcatttctcctgcctcagcttcccgagtagctgggattacaggcatgcgccaccacacccggctaattttcgtatttttactagagatggggtttcaccgcattggtcgagctggatttgagctccggacctcgggtcatccgcccatctcagcctcccaaagtgctgggattacaggcgtgagccaccgcgcccggcctcaatttatcattattcacgcatccacaaactgggttcttatattttgtacgtgattttttccattgaggagagatatctgtgcatattcatgctgctcatatttcatccacaaactcggttcatatttcatccacaaacataattttttccgttgagaagagatacttgtacatatttatgctgttcaaattcacatttcatcattcttttacaagaaatagataatgtattttaaggttttccagtggtattacagatattttactgggtgtatagatagaaattaaaccaaacttctttgttctggccgccagtcatgcatcctgttttcaacatagttcacatacaactggttgtgtaaaaatgaaattattttgtttagtacaatcatcaacagttggttgattagatttttaattatcaagttaatcattgtcattatgcttctcatcgcactcgtcattaattgctgtgggaggaaatttgttatgttccctatgagagggtgtatcacaaattcaaataagaattcaacgacaatggactgtataaaggaaataagcaagtccatggaaaacatatttttttccggaaaggattaaaatatttttaaaaaggaattaaaaaaaaattgggcacggtggcaaatgcctagagtcccagctgctcaggagatggagacagaaggattgcttgagcccaggaataagttggaggctgtagtgaacagtgattccaccactgtactccagccagggcaatagagggaaaccctctttctaaaaagacaaaaagaaacaaaacaaaacaaaaaaacaccacatcaaaaaacccaacaacaaaatgaaaaaccaaataacagcaatacaattggagctattcgatccaaagaagtaaatgaaacataaagcaaataaaagagaaaagctaatacctgtgtcctgcaggactcagtccaagttctgctctgactccctcctggtgagccaccccttaaaaagtcacttggggcggggttactttgacagacagtcttctgtcaaagagggaggcggtaaatagcacttttttttttttaatttaacgcctttccaacaaattagcggctatgttgtctaagagtgcaaatgtcagaggtgggtacaggcagcaagaccctccccacaggggcagcagaaggaggaatgactaagggaacaagactttagtgtgctcaactacacaggacaggaaacagatgctttttacaaaagctggtggacttgaaggcagaatattttcaagttcctgtaactgcgaactatgacctgtagcctgtgagagtgactttctgtggcaaaggagcttttgtgaatgtgaggaagttaattatcttaacagtgggaggttctcccggcttatctagctagaccctcgtgaaatcccaagtgtccttaggaaggggaagcagagagagatttgagtccagaagaggaagaaggtgatgtgaggcccagtaggggaacaaagggcgatggcatgtaaacacttagcccccagaagtgggagagggctggggttcatcacaccagaatccctaacaatcagccttattttaattacccttgaaatggaaggaggccttagagagccagaggcttggaggggcaccctctgctgcatacacagatcccaactgctgtgggctccaaataattgcaccagggaaatcacaaattatcaaaaataaaggatgtaaagcttttaaaaaatattaaaagcccaacaaataaaaaaagttctaaatctataaaattgacctcagtctgtatatttagatgagtcatgtgtatatagcgtttcacttcaaaatatatgataaatctctcattcattggcttaaaaataaacacttcaatcaagtctttatcagaaaaattgaaacgttaactcaattgccttttagttcatgtgactttacaaaacttaaaacaataaagtcagttttaaaaattattagtaaagtaaaagaaaaatatcttcacaatgtagacattttgtccacatgagacatgtgaaatattgccattactaaatatttgcaggtcaaaaactgtttccaaaacattttaaataatcatctggcctgtctgttttagagcattcaattctagctgaggtctggggacatgtgaaaggagccacggcccgactccgtgctgggaagagtcagacattttccacagctctgtcctttgctgtgggctctgcaactcctaccaattaaaattgcttacgtttttgttttatttttactaaagaggggttcctaaaagctaacattatactgagtatatgtaactaaaactactaagaaaacaatttcacaattatacaaatgtgccaagtaaatgaaaaaataaactgtattttaataaaggttataaaaagaaaaacatatagtggtgtgaggactgtctcaggtcttcactgagcaagggatcatgacattctatggcggacagctgaccttggctttctgctcctcttgattatgtctactaagtgacatacttactctttttccacctgtcttgcctctaagggtaacaggttttatgagatccctcctagtgctttgcaggtcagcctccctttgctgcattccaattttactgcctataccctccagctggcttttgatgacaaaagtcctggtcccagccattctcagattctgtcatccccgtgggcactatggagctcagcactatgggaggttccccaaaaatctcgttttctatgaggaatggccaccacctgcatctcagtgatgctagtgacccctttcctactcctgtgctcactggtcctcatgaagatcctggttggtctgtagccccctatttttcctattaaagagaaattacagtaagacccatttgtgtgcaaaatcaattttaggcttattacacttggcctgataatttgcataaaatgcagcaagaattcatcggccatataggctacttttgagttaattttcctgggtttttacctaaaaatatactattttggttagagtcttgtgaaaataaccaatgtgttcaattgttttattttaaaaggctcttactgaacactataaatatgtataagttgaatatacaaactatattgtcataaaatcacaacccaaaatgtggagaacgcagagggaaaggtaaatttgctcgcaaaaacatacttcacccaaataactggaaaaaaaaaaagactttcatgacccttctttaaccagagcagcagctttcaaacaaggtgtttgccttggaaatgccattcacaagccaaacggcccttgagagctgtctgtcaggcactgtagaatctagcagctcctcacagagttagaaatagtttcaggaaagagattccctgcttttagtaactgcactttatattcccagatagcgagattgtatgtaaaccatttttatcttattctggaactcttttgggtactttttttttttttttttaaatgatggagtctggctctgttgctcaggctggggtgtagtggtgcgatttcagggtatgagaaaatgcagctggacctggctctttccaggaagaccctcacagccaaggagtccaaagcctggggttttcatctaattccagtgtgactggggtaggagcagctttggtgctgggtgtgtgtgtgtgtgtgtgtgtgtgtgtgtgtgtctatgcctgtgtctgtttagggtgttaggctcgtggttgtctagatacaaatgtcccagggctcaggagccccagggttatgtcaggggcaccagatgaaggtgtcaacagaagttagggcacaagggacaaaggtgagagcaaggttagattcatttaggtgcaagaaatcatagagggaggagggagaggaagccctcctgctaccaccgaggaagaagcgcagcttaaggcagaaagcctgtccggagaggaagtgagtttgagggcagggctctctgggtaaagtacggtctgggacaccagcctgggggaagggtacagaatgcagagtggcctggcgtggggactaagaacagaggagagcagctttcactgggagggtcagtgttttcagtgtccagcactgagcaaggtgagatttgggcagcttgctgtgaaataaggtcaggctctggcattgtccccattgcgtgtgtgtgtgaggggcactttgggagagtgaactctccacctccatcctctcatacgtccttcaaccgagcttgccagttaccctgattccaaggagatctatttattgttgacaatactggatcctagcagaggctgggtaggagcctgggcacaagcaagtggaggagggggcctgggcctgaaagacctgggaggtttgagagaggacacagcccacagaatggagcagatggggtagagtcggcaagcattcagggctcctagtaagttggacaatggagaccctgaaagatccagtaaaacggggagaacaaacaggtccccaactcacatccttgcagtgcctggagcttcagactccagacaggtggggaaggaaaattgagggatgtgaacatgttggagaatgtcgtgccctgaagaatgaagaaaaggggggtgaggaatgagagcaggaacggcttccagtgcctggtgcccaggagaactcagaaaatgggtgtggtggagaggaatcgaggaaccggaagtggtggaagtgtgcagggcccctccgagatcactgtgactgccaggcgtcctccctggctggagagcttcactgtcctccttcccagccaaaatgtgtcccttgaaagcttcctccccaatggactggttctgggtcctatatatttgaaggggtggcctgcctctccacacctgtgggtatttctagttgggtgggaggagagacagagaaaagaaataagacacagagacaaagtataaagaaacaacagtgggtccaggggaccagcactcagcacaccaagggcctgcaccggcaccggcctctgagtttcctcagtttttattgattattattttcattatttcagcaaaaaggaatgtagtaggagagcagggtgataataaggagaaggtcaatgaaaaacatgtgagcaaaagaatctatatcataattaagttcaagggaaagtactatgcctggacgtgcactcaggccagatttatgtttctctccacccaaacatctcagtggagtaaagaataacaaggcagtattactgcaaacatgtctcacctcccgccacagggcagcttttctcctatctcagagttgaacaaatgtacaattgggttttacaccgagacattcagttctgaggggcaagcaggagacagtggccttcctccatctcgactgcaagaggctttcctcttttactaatccacctcagcacagaccctttatgggtgttgggctgggggacagtcaggtccttctcatcccatgaggccatatttcagactatcacatggggagaaaccttggacaataccccgctttcaagggcagaggtccctgcggctttccacagtgtattgtgcccctggtttattgagactagagaatggcaatgacctttaccaagtatactgcttgtaaatattttgttaacaaggcacatcctgcacagccctaggtcccttaaaccttgatttcatacaacacatgtttttgtgagctccaagttgggtcaaagtggctgggtcaaagtggctggggcaaagctacaaattaacaacatctcagcaaagccattgttcaaagtacaggtctttttcaaaatggagtctcttatgtctttcctttctacatggacacagtgacagtctgatctctctttcctttccctacatatattcatggaccacagtcttcaaggagtccatttcctcactgtttttggtttgatttctctgaaattaggaaatgccccattgaggcacccaggattgtctttacttcccccagagcttccactcctgaggcaggagcttctcaaacaccccccaagactcaacacctaatttcaccctctgaaaccttcccatttcttaaatccaggcagggtcatggtccttagcccctcagatgctgtggagaccttctttccctttcatacattctctcaagattaaaagccacccctcctcagcacacaccccagagactcaccccaacatgcattgcaaatcaccctggaaacagtcataagaccacactcatttaataatattttatttatcaaaagacactctttctcaggtaagtgaagttctggagaggaaaagaggagtcctgatgtaaattgccctgcaggccttgctgagatcacaaggagattgttactgcagcttgtagcacaatagtaaatttcttctctggatggaagttcaacaatccagatcgtagtatattccttttcattatgctcagtccagcaaatgtgatgataacaaattccttttcatgatcatccattcagcagagaaaatgtttgtaaatgtgttttcatgaagatgtttaccataacatacaggatttaccattatcaatgcatccacaaactctgctgttgttttttatacataattttttccatcgagaagtgatagttgtacatattcatgctgttcatatttcaaccacaaactctgctggtttttttatacgtaattttttccattgagaagtgatacttgtacatatttgtgctgttcatatttcatgtttcatcatccttttacaataaataggttatattgtattttaagtttttctaactgtagtgcagaaattgtactgggtgtatacatagatatcaaaccaaatttacttgttctggctgataatgcatcatttatttcatagattatgtatttctttgacacatttcacgtacaactaattgcataaaaatgaattttcttttagtatagacatcagcatgtgcttaattcggaatttaattgttgagttaaacatcgtcattgccttttccgttgttattaattgctctggtgggaattttgttatctcatacataagacagtgtgccacaatatctcttaaaatttcaatggcaataaactttatatttaaaaacagggaatctatggaaaacacatttttttctaaaggattaaaatatttttttaaaataattttctaaaaagttaggcacggtagcaaacgtctagagtcccagctactcaggaggctgagacaggaggattgcttaagcctacgagttgggggctgcagtgaactgtgattgcaccactacattccagccagggcaatagaagttaaccctttttctaaaaaaaaaaaaaaaagaaagaaagaaagaaaaaaagcaacaacaccaaaacctcaccaacaaaatggtaaagaaaaaaaaaacagcaatacaatgtaagctatttgatccaaagaagtcaatgaaatttaaaacaaatgaaagggaaaaagtaatacttgagtcctgcaggactcagtccaagttctgctgtgcctccctcacggtgagccacccctttagaagtcacttgggtcataagttaacccgataggaagtgtcctggccaatgaactagggaggtggtaaatggcaccattttaaatttaaattcacggccttttcaacggatcagtagccatgttgggtaagagtgcaaatgtcagaggtgaaaagaggcagcaggaccctcccctagtgcttgggcaacagaaggtggaatcactaaggggacaagactttagcatgctcaagtacacaggacagaaaacatgctttttacaaaagctggtaaatatgaagagggaacattttcaagttcctgtaaccaagaactaccgcctgtaaccggtgaaagtgactttctatggcaaaagcgtttttgaaaaggtgaggaagttaaatatcttaatgttgggaggttcttctggtttatctggctagaccctaatggaatcccaagtgtccttatggagcggggagcagagagagagatttgagtccagacgaggaagaaggtgatgtgagtctgggtgcgggacagggggagaatgatgctatgtggggatctgggctggggaatgacttagctgcatgagcggagtgacttagactcctgaactagaagaaatctagggctcatcacctcagcagccctaaccatcaaccttatttttattacaggtcttccatcgacggactccctaaaaagccagcggcgtggaggggcgccctctattggacaaatagatcttgactactttcggccctcaaatagcctgactaggcaaataacaaataataataatttttttttaaatcatggaaaatattttaaaaaacaattaaaaagttataaatctataaaatctgcttctgtctgtgtgtctgtatatttagatgtctcatgtgtacataatgtttcactaccaaaatatatgatgaaaccctcattaatcggcttagaaaactaaacacctaaatattttctcagaaaatacaaaaactttaactcaaatcccttttaattcacctgactttaaaaatctttaaaaaataaagcatgctttaaaattattagtaaagtaaaattagaacatcttcagaatttagacatttggtttaaattatacaggtcaaatactgcccttagtaaatattttcaggtcataaacaactcctgtaatcttttaaataattgaattacatgtctgttttagagctttaagttctagctaaagcctggggacaaatgaagggcaccatgccccctctctgtgctggaaagagacattttctacagctctgacccttgcagtaggctttgcaactgctacctatcaaaattgcctacatcctaagtttattattaaaaggagttgcttggagttaacattataatgaatatatgtaactaaaactatttctcatacaaagtatatgaaaaagtagaatgtatttttaataaaaagttataaaaagacatgaacatgtagtttttataaaaaacagtaattttgtctagttttgcagttctaaaaagttatgttaaattcaaaaataaaaaataacaagacaagactcaaggtttaaataagttgtaaaagatttgtaaaaattagttctataaaaattttacaaaaaaaagcattggttaaaatttaaggaattattttgtttttacagaaattaaacattcattaaaaacactctgatacaaggccttaatttgggttcatgtatcagaatagcagggttttcttagaatattaatctattctttaaaagaactatgaatgttatgcaaactttataaaaatcttaccttagagtcaaactgattaaaattccatagattttacgtaaaattttattaaaaattaacttcaacaaaaataaaatttgattttctcctttaaacaaaagttttgcgtaatattaaataataaagcatttttgtttaccttttaaactataaacacacacacacatacacatacaccaacactaaagtcagctgacctcatactgtctttattggatattcttgtttaaaaaactatcttctttggaaaataaagttttttattttaaaccatattttaaattatcattttgactaaatccataacatacagtgatctgtaataattctattttataatatcaagtgttttgaagaactccaggaacagccatgagagaacactgtggtttagtaacactttatttcctcagtttgaaaatagttgtctttcttggggaggccggtttcagcagatgaaaacaagagtcatgatgaaaattacccagcagtggttagtgtgaccataggaacattgtcatcaggtcagcagaaaacatatcagcaaatttttctcatactggcagtgtgtaggggtggatgtttacagttcctgaagccccagtggtcgtgtggtcttttagttttgccatttataggcaacttgtggtaactagctcaattagacacattccttatcacaaggacagagggctttctgtatcctagggttcttgccttggcattccagaagaatcaggtcacacgtggacgtggagaatgagtgcaaggttttattgagtggaagtagctctcagcagatgggggagccagaaaggagattggtttctccctggattggggccgttcagcagccctggctctcctctgactgccccaggcaaaatccacatcgttctataagtcggtgccctgctggtgtgctggtgcctgttgtcatgttcctcttcatgtccagccgcctgtgtgttcctccgctgatgtgctcctctcgacgtcaagcctcctgtgtgtctgactgctagggtcttggggtttttataagcacaggatgggtcttagcaggccaggatgatcttgggaaagacaacattcggtcaggaaaacaaaaatgcctgttgtcatctaggtccgtggggacaagcccaggtgtggagcttttagccagggaccacagcctcctgtatccaacacttcccttcaccttttctatatcattcaaagggatcatgcccttcccatcccagcacttcactttcatgtcatttgccccctctgaagaggtacatctaactgccattagaatatggatgatgaccagtcttagctgcttcctgctgaaagggggcattgttttgggggaaaacggcagtcagattcctcccaggggtctctataataaaagatcgaggtggctactttcaggaggtcctctaatgtactatctggtcccaagtcccatttctgcaacctcctcctgatgtcaggagctgcctgagtaataattttatcctttaggattatctgtccctcgattgaattaggagatagagaggtgtgatttaccaaggcctctcttagcctctccaggaaggcagtgggattttcatcaaatccctggttaattatggacaacttagtataattgagaggcttggtcttagacctacgtaagccctctattatgcacacctgaaagtgtctcctcttccagtcttccatctcattattgggatcccatttagggtccttcactggtgctacttctcttccagttggataatattcgctcccttccctgatgctataggtgatgcaaagctcatccccaaatctctctgctgctggcagagcagcctgcttctcagtgtctatcaggttctgactcaaaagtaacataacgtctctccaggagagttcaaatgttagggtgaaattctggaaagcttctatatatctatcagggtcatctgaacacttgcccagatctcccttaatttgctttaagtcttgtagggaaaagaggacttggaccttactgggcccaaattcactgggcatctgtaggaggggcaagagtgagactgggcttgtttgggatgaagatttctaggaggggccaggtgagaggctgaagctggatacggaggttggggtggacccagaggagcagggcttgagggagctggcacgtcagctgggggtgcgtctgggactcgtgtctttaattccctgggcttgaccctggcagccttccccgagacagcaaacaggagggctggaacaatcctacatgtcagcaaaggtctggattgctttgcaaggtatagaaagcctgcacatttggggcctcagaccatgtgtcctcacatccagagaaaagttctaattgcaggatggtattgaaatgaatggtcccttcctgaagccaagccagtccttcctgtaaaccataatttggccaaacctatgtgcggagggctatgagatgcttttcctctggattctgagggtcaaaacagtcccaatggttcaggatacactcaaggggagtacaagctgggggtggtgaggagaactggctgcccattctgaaagacagggaatagaggtgttcctcatttcccttccttcttttggcaaaaagctcagggtgtgatggggagggaaagcaagcatcttcacttcactttccacctcttacccctgcgccctggcaaccttggcaggtgccggccacaggtacaaatgcggtatgtacccatgaagcagggagaacctggagattaggaattaactgccctcacctatgtttccttttctccctgctgttgaaaaactttgagttccctgggcctttttatcccatgaggcatggcctccttctgtgggatggggttcagtcagcaggaattggtcctgtccatttacattgtgcctgttgcctggctttgaattcctcagacctgctttctctttctagggcctcagcctgaagcttggaattgagtttgggactgaaaaagcatttcagaggctgtttatatccatttagtgcctcaaataagccctgctgaatttgcaattatcagccagcaggggtcactcctctgttaacttccctattagaaacagagcggtggggattctcacttagaaaagaaaaaaagagaaaaacagttaaagaggcaaaaagtggggaatgctgggggaagaaccccttgcttagtgcaagtgggcccctctaatccttataactttcccatccttcccccagttcagaccaggttgaattccttggccatggaaggaaaggttccattgatgcagtgggtgagaagcactctgtagggtcctggctaccatcggttttctcacacccccctcatcccaggcagtggagggagacacttctgcgacattgctccccctgccccttcatggctattgggtgtggcctttgcctgctgcaggcatgcctaggtgctggagctgggagggaaaagggtaaggagaggtgccctggaagccgctcatgcctggggctgtcaaggtggaggcatacatggcacctctaggaaaaattggtctgatttgcacctttggcggctgagccaaatgctcattttacttagtaacattgcctcagcctgtagcaaaactcttaacattataaaggaagagataagatccatttcaaataatgtgtgagagagaaaagagatgaaaggaaaacagagtcttttacctgcaggaaagggagagaagtggcagagttttggaagaaaggcaggcccaacagtttcccattcactcacactcaccttccgagatcccagacgagccaccagttgaaatgggaaaagtttccttgtccccctcacaggaggtggagtgggggtgtggcttgcttctttagtactccgctgctcaaacctctagggaagcatacagactggcaagttgtggggctacaaccccatggcagcatctaggggtagatgtttacagctgctgaagccccagtggacatgtggtaccatgtgctcttttagttttgccatctataggtggctttgtggtaaccagctcaattagacccattccttaacccaaagacagagggctttctgtatcccgcggttgttacctaggtgtaccagaaaaatcaaatcacacgtggtcttggagaatgagtgcaaggttttattgagtggaagtagctctcagcagatgggggagccaaaagggagaatagttttcccctgaagtcgggttattcagcggcccaggctctcctctggctgccccagccaaactctatgtcaatccattggtcggtggcctgccagagtgctggtgcctgttggtggattcctctcagcgtcgagagtttttccctctcaggaaagggagagaagtggcagccacccatgtgttcttgcactgatgtgctcctctcgacgtccaacctcctgtgtgtctgcctgctagggtcccagagtttttttaggcacaggatagggcatggtgggccagggtgatcttgggaaatgcaacatttggtcaggaaaacaaaaatgcctgtcctcatctaggtccaggggcacaagcccaggtttggagccctagccagggaccccggcctcctctacccatcactttccttcaccttttctgtatcattcaaagggaccatgcccttcccttcccagcacttctcttctgtatcaataggtgatgtttttaaaatttcccaactctagtgcaggcatggtactagacatatacatagaaataaaaccacacttattcttctggctggcaagacatagtatttttgccaaattatgtgttgttttgaagcattttatgtacccctggtcatataaaaataaagctattttgttcagtacaaacagcagcattttctggattagaaagttaatcatcttaaaagatcatcacggatttttccattgcactcatcactaattgctttggcaaaaaatttcttatctcacgcatgacaaaatcagccgcagtatctcctagtaatttaatggtgatgatctttataaaggaaataagcacatcaagggaaaacataattttttttaaaaaaagagtaataaaactttttaaaagtcttttttaaaagactgcttttctaaaatagtaaaataaaactccaccaataaaaccaccaacaaaacagaaaagaaaaaataatgatatgatcggagctatttgatgaaagatggtaaattaaatttaaaatgattagaagagaaaaagcaatacctgtctcccgtaggtctcagtccaggttctgctatgcctttctcctggtgagccacctatttaagagtcgcttaaagcatatgttaatccaacaacagcagattaaaaaccaatgcaatctgaactatttgatctaaaaacataaataaaatttaaaacaaataaaagagaaaaagcagtacctgtgtcctgtaggtctcagtccaagatctgctctgactcccttgtggtgagttagccctttagaagtcacttggggtggggcatatgttaattccactaacattggttctggccaatgagtcaggaaggtggtaaatggcaccttttcttcttgctgatttctttcagttcctttggagtctggacattagtcctttgtcagatgcctagtttgtgactactgtttcctatactgtgggttgtgtgtttaccctgctgatatttcttctgccttgcagaagattttcggtttcattaggtcctattgatcttattctatttttatatttttgcgtttgcttttggggcattagtcatgactacttggcctaagccaatgtctagaaaagctttttggatgctatcttgtagcatttttagactttcaggtcttagatggaagtttttatatgctttgttaaagatcaggtgactgaaagtaccgggctttgtttctcggttctctattctgttccattgctctatgtgcctatttttatacttcctgcaccatttattgaataaagtgtcctttccccaattagtgtttttgcatactttgttgaagattagttgtctgtaagcatttggctttatttctgggttctctattctgttccattgctctatgtgcctatttttatacttcctgcaccatttattgaataaagtatcctttccccaattaatgtttttgtgtactttgttgaagattagttgtctgtaagcatttggctttatttctgggttctctattctgttctattgctctatgtgcatattttataccagtatcatgctattttggtgattgtagccttgtagtataatttaaagcctgccttcagatttgttctttttgcaaagtattgctttggatatgcggtcacgtttttggttttgtataaattttaggattcttttttctagttctgggaaggagaatgatgatattttgatgagaattctactgctctgtagatggctttggagagtatggtcactttcacaatattgattctacctattcataagcttataatgtgttcccatttgtttgtgtcaactgtgatttctttcagcactattttgtagttttccttgtaggaaacttacattaacctacttggttaagtatatttctaagtattttacttattaaaaattctcagggaaatgcaaagtaaaactgaggtgggaaattaaagaaaaataaaattaaaaagaaagggaaataagctttcttgtattaagctaacttgtcccagaggcagcaacaggcacagcccagacccaggaaaagtcttgataatattatttattgtattctggagactcttccagcactccttcaatgtagggagaagaaaaacaaattttcctttgttttatggtatgagtttatagattcttgttctctttaactagtaacttcaagtattctgttttatctaagaagtatggcaaaggtcatgagaagcctgagcaggcctgaactacagctctctaggcaccatagtgaagataaaccaatgcaagcctctttagagcaaaacctagataatagacatctgggttgcatagcaacagttatgtgcaatcctgagttatgaacctgttacaatttgattaactgtctttttcctgcctctgtatccctgctttcacaccactgtaagcttgcttcaagctggcccacccccttttgtgaagtgtgtataaaagtcaagtgctgtctttgttccaggccctgtctttggacgtgagtctgctgggcctgagagcactcaataaaagattctcctgttttaacccaaagcctctctctcatcctcctaaatcccacaacaaaaccacaatgagatgctatcttaatcttgctagaagcccataatttaaaagtcagaaaacaatagatgttggcatagatgtggtcaaaagggagcactttgacactgctagtgggaatttaaactagtccgaccactatggtaaacagtatggggattccttaaagaactaaaagtagaccattcattccagcaatcccattactggctatctacccaaaggaaaagaagttattccataaaaaagacacaagaatatggatgtttatagcagccgattcgcaattgcagtgatatgggaccaacttaagtgcccatcaacgaacgagtggataaagcaaatgtggtacaccatggaataatacttgataataaaaaggaacaaaataatgtcctttgcaacaagttggatggaactggaagccattattctaagtgaagtaactgaggaatggcaaatcaaatattgaatgttttcacttttaaatgagagttaagctatgagaatgcaaaggcataagaatgatataatggacttggggactcagggggaaaggttgggagggggatgaggaataaatgatgacatattgggtatattatacactgctcaggagacagatgcctcaaaatctcagaaattaccactaaggaacttttatccacataaccaaaaaccacatatattccacacactattgaaagaaacataaacattattttaaaaaataaagccacttttaaaattagcaaaataaaataaatatgtcttcagagtttagatattggatccaaattagacagatcaaatactgcctttactaaatattttcatgtcattaacaacttctaaaacctttcaaacagttttttgacatgtcttggaaccatccatttctagctaaggcctgggcacctgtgaaatagggccatgcccccccttatactgggaagagtaagatatttcaagactaagatgttttctacagctccatctttttctttaagctctacatcaaggacataattaaaattggttgtctcctaagtggtttactaaaaatgcatacttaagagttaccattataattaatatttgtatctaaagctacttaaaaattttcacacacaaatctgactgaacaagtaaaatatattttaagtcaaagtttataaaaggacatgagaacatagcttttatgaaaaaattagttttgtcaagtttagaggttttcaaatattttaaattcaggaaataaaataacaaaaagacaaaagaaaatggttgaacaacttagaaaaggtttgttaaaattcatcttataaaacaatctacatgtaaaaagtgggctaaaatttgaaagagattatttaggttttccataaattaatccagaaggggtaggaagtcttaagaatgaggaaggacaggaggaaggggaggtcatcctgacactgcagaggcagaagtgcagctgaaggtatgaaggctaagaggggaggggagtttgagtgctgctgcctggctgtcagagcagaggagggtcctgggcaccagacttgaggaagggatgaaaatgctgggcagacctgtagtgggcccttgagatggcagatagtggtttccagagagagggccattgttttccagtgcccagcactgagcagagagagttttgggcagtgtaaaaaaaaaaagagaacttacctctttctcgttttagaaaaagaacagtctaagaatatcagcagggaaactctcagtgcttcaaggggttaaacgcccttttggctttcttgtgttggtttcatcatagaggaggagaaacttcttggaagtgttcctaaaaacacaacacgtctgcttctcctttcaaaaaaggaagtgctaaaacacgaacactctagatccaaatattaatacggatgtctaaatgcttccgttttccaaggggcagaaagctaaaggttgtaacctattcatttcagtcaaagttggtgaaagggaagcaaaggaactgggtggggcttggaaggatgacgaagctcaagctcattggccagcaacctctctcctgggggcgggaggggtgagcatacgtcattgctttggcttctataaaatgaggaggactcaccgagtgtgaagagtccttctggtgattgcagctgagagcacactcacgacgttctgcaaggattctctgattatgattctgaagggaaaagcgatggaatggacagcagagattgtaattttctttatcttgaattacggaagaaagtatctaggacagaaatccacgacaagtccttggaaccagcagatctcttcgttcacggagacgttgacgtattctctattgaagaagattcttaccttcttactggacaaggttttgtcagttctgcgtgactggattgtccgggagactctgaggaaactgatgtcacatgtttttccaaagaagatgtttctggaaccaacaactgtgattgtggtttgaggacttctgagagttccagtacaggaaataagcagaacatcagctggaggctaaacggatccagacttcactcttcacttcccttcctattcagtctattgtgcctgctgactgagaagcttggctggtatgtgagcaaataaacggaactattcagaaggagatgttgacatattctgtattgaagaagatccttatcttctcacctgacaaggttttgtcagttctgtgtgactggattgtccggaagactctgaggaaactgatgtcacatgtttttccaaagaagatgtttctggaaccaacaactgtgattgtggtttgaggacgcctgggagttccggtatgcgaaataagcagaacatcagctggcggctgaagggatgcagcctccactcttcacttcccttgccattccatctattgtgtctgcctgactgagaagcttggctggtatgtgaggaaataaacggaattataaacaaggagattgtttctcatctacttcattctgttgtggcttttctattttggggttcagggtgtgtgacaaggaccaaggagatgaaaggtttcatgatggagaaagcccaggcaatcagattgaagagctatccacagggaatcttggctgctgaggggctgcaccctgcaacggactgaccatatgacagaaaagggttttaaaggctcaacttctggactgagaacccagagtaatttgggaacctcctctgtgaggagatatgaaagctgggaatcatgacatccctaggaatggaaggcacatttcctgatggaaggggtgctttggaaaacaggagcagagtagacacagcagccttgtggatacgggtgggcagcatgcatgggtgatgtgaacgtggagtgtttgtgatcgaaactcaaaatgtctgacaaagtgaaaacctagaaaccacaatgaggaggaagagtttgtgagggcaatcactctccccatgtgtgaaaatcgggggctcttaaaatctcatctggagaggtgcagtctaccaaactctgggactttagcctccccttttaaaaaaccgtgcatcaataccaacgtccgaaaccacagaaataacacctggcttgcatggagacaaggacaaaaagccgtcatgatgagttgttctgctcacttgctgcctctgttcagtgcacaggatattgtccacccactagcaggctactgcaagagaagtgtgcaatatgttccctatgtgccatatatgtgccatatggcccatatgacaactgagtcagaaaatatctgatgccctcagagttacactccacctggagcttgcccccagccatccaggacctaggctccctaccctgtccaattttctggtgttttgggggcttcattctctaaggtgtgcccactctttactcaaaccaaaacacccacatattcctgcccatgaacaaccaatcaaccacttctcagttccacatcctgctgttgggtctctagtggtgacactgtaactcccaggtcatagtggtgacactataacacctagctaaattgatgccttgtctctaggaggccatgggctcctgcaggtctcatctgactctctgtagccttccctgacaatgctcacaatacccaagccagagccacattgacagcaagctgctctcatcttacctttgccagacctggccactggaaaaggctgaccctcatcctgcaatgcctatacctccaacctttgtctcaagctggtgtcctggagggacttctaagcagaaaacagattcagactcccatcctctcctgaatggcctcatatccaattctcagaccctcagccttcattgtaaggacacttcatccatgcccttgagtattctgtctgcactgtgtattctgcaatagattctcctccctctgcgaccctcaactccttccgcagactttttgttttcttgatcatctaccatagtcttccactgggacactgccaagcccattctggagagtgagttgtgcaagtacactgccccccatctacctttcgggaggtgtatacacccttctttctcccaggtctggaggctttctattttcatcctgaggcatctccacctgctcttggattcttcaaattgacaaccaccagttaacaagaactatgtgtcaccaaatagccaaacaatggcaattacaaaaataaaattaatagctgtaacccccattagcaaggatacacaaatcaaatcagggatagtgggtgaggaagtctgcctaacattcaaggaaggattctgaagtgatacaaaatcattgcctttgctatctttagaatggacactttcagccaggcacagttgctcagcctgtaatcccagcactctgagagccccagttgggtggatcacttgaggccagcagcttgagaccaccctgggcaatgtgcagaaaccccaactctactaaaaatacaaaaatagccagttattgtggcacatgcctgtaatcccaactccttgggaggctgaggcacaagaatcacttgaatctgggagccagagtttgtaatgagcgaagatcatgccactgcactctagcctaggcattagagtgataatctgtctgtggaaaataaaaacattcctcttcaaagttttcttctttaaatcataaatgttggaattaatatatcctctttgaaactcactttcttcaagcttctttatttgatggtagtaaatctttgttaagctttatgaggcaagagtaatggaagaagcatattatatatatttatactctaacctcagtgcttgttctagcaagctcaggcatgcgtgaatgtgcccaggcatgttccagcccataccttatatcctttccttattgggaaatgctgttactcctataagcattcttgtaagcaacttcctctttttctttgtctccactatctttacctattgaggacagttttaggttcttagccagttggatgtagcatagactgtgaggtccaaccccagccaatggagatagcacacagcagtagcgacctcatgcttaacagataaatattcctgtctccctttgtttggggtgctctcagctgatgagcaacaccctttctaaagaaattaaagttgtcttgctgagaaaacttttggtctaaatgctgattcttccttgcagcactgaagaagaagcaattatttccaacactttctcatacacaaaaaaagaagaaggtggaagaaaactttcttgtgcaccctatccctcactcagaaagacaacagaaggctcctagtggcaagccctagaggattcatttcttttgggaaccctcttggctgggatactaggactcaggtcaaactcagcattttcagtgtgtgggaagtgtgcttgggtttcactgttacttccaataatgtgatttggtccttggggttcaccaaattttggtatggagtggtgaaccctgttaagtttaagtgtctataaaattaacaaagcaaaataaccattctgccccatggttcagagaccaaatattgtgtaggaaatgctttagcgagagaaacagagaagaataaaaaatgtcctcaagcgctgcattatttcttgttatcgtccagatcttagaggaaaggctttcattttccctcattcagtatgatattagctgtgcatctgtcatttatggcttttattatgttggggtatgttccctgtgtatgtagttttttcagggtttttgttatgaagtgatgttgaactttatcaaacgtttttcagtttcagttgaaacgatcatatgctttttgtccttcattctcttgatatgatgcatcatgttgatgatttccatatggtgcactgtccttgcatcctgggcatgaattccacttgatcatgacaaatgaatttttaatgcattcttgaattccgtttgctggtattttgttgaggatttttgcatcaatattcatcagagatattggcctgcagtttctttttttttcttttttctttgttttgttgtttgtttgtttgtttgttttgatgtgtctatgtctggttttggtatctgggtagtagtgttccatccccttttattttttagaataatttgaataagactggtgttggttctttaaatatttggtagaattccgaagtgaagtcattgggccccgggcttttctttagtggaaggctgtttattatggcttcaatctcgttacttattattggtctattcatgttttgaatttgttccttatttaatcttggtaggctgtgtgtatctaggaatttgtccatttcttttagattttcaaatttattggcacataattgcccattgtagcctctaatcgtcatttgagttcctgcagtaccaattataatgtctccttcttcatttttgattgtatttatttggatcctgcccctttttttcttacttaggctgcctaataatttcttaattttgttgaactttttcttttgtttgtctcgctctgccaccaggctggagtgtagtggtgtgatcttggctcactggaacctccgtctcccaggttcaagcaattctcctgcctcaccctcccaaatagctgggactacaggcaagtgccaccactcccagctaatttttgtatttttagtagacacgggttttcaccatgttggccaggatggtctcgatctcttgacttcataatccacctgcctcagcctcccaaagtgctgggattacaggcatgagccactgcgcccagcctaattttgtttaaattttcaagaaatcaacttcttctttcattgatttctgtattttttatttccattttatttatttaaactctaagctttattctatcttcttctcattttagctttggtatgcttattgcctctctagctctttaatgtgcattgttagattgtttatttgaagttcttcctctctacaccataagacgtaagcatgtcctcattatgtcataagatgtaaccacttacagctataaacttccttcttagttctgcttttgctgtatctcataggctttgttatgttgtgtttccattatcaattgtgtcagaaatttttcaatatttttcttaatttcttcattgagcaactgatcatttgggagcatatttttaaacttccatgtacttacatagtttccaaaatacctcttgtgatcaatttctagttttattccactatggttcaagaagatgcttgatattatttcaattttttttcacattttaagatgtgttttgtgacctaacatatggtctactttttttttttattaaactttaagttgtggggtacatgtgtagaccgtgcagttttgttacataggtatacacgtgccatggtggtttgctgctcccattaacctgtcatctacattaggtacttctcataatgctatccctcccctaacctccaccctctgacaggacctggtgtgtgatgttcccctccctgtgtccatgtgatctatttttgagaatgatccatgtggattagaatgctgtggaaaagactttggattcctaatatccagggagggagacgatgatattactttcaatatcacacgggtgtacacactctctgtgacattgttcctaatatccagtggaagagaggatgatataacacccagggagggagaggatgatattactcttaatattgcagggtgtgtacccatgcctatgatattgttcctaatatcaggagggggagaggatgatattactcagaatatggcagggggtgtacacacactctgtgacatggttcttaatatacaggggagaatgggacaatattactctcaatatcgcagggggcgtacaaccctgtgatttgttcctaatatacaaaaggggacagtatgatattgttcctaaaatcgcagaaggtgtacaacgccctgtgatattgttcctaatatccagggcgggagaggatgatattacccccaatatcacagggggtgtgcactttccctgttacattgttcctatgatccgagtggggggaaatgacattagtcccaatatcgcaggatgtgtacactactcccccatgatattgttcctaatatcaagggggagagaggaggatattactcccaatatcgcaagggaggtacatcctccatgcaatattgttcgtaatattcaggaggagagaggaagatattactctcaatatcgcagaaagtggacacccaccctgtgatgttcttcataatatccagggaagcagacgattatatgactttcaatatcgctgggagtgtacatcccttttgggatattgtttctaatatccaggaagggagaggattatattacttccagtattgcagccagtgtacacatttcttgtgatattgttcctaatatccagaaagggaaaggatgatattactcccaatattgcaggtggtgtacacccccctctgatattgttccttacatcaaggaaaagaaagaagaatattactcccaatatcgaagagagtgtacacccctcctgtgatattgtatttaatatccatggggaaagaggatgttgttactcccaatatcgcagggggtttacacccacactgtgatattgttcctaaaatccagtgaaggagaaaataatattgctcccaatattgcagggtgtatacaggccctcccccgttatattgctcctaatatccagcggtggagaggatattactttcaatttttgcagggagtgtgtaccccctctctgatatttttctaatatcaaggatgggaaaggatgccattactcccaatatcgcaggaggtgtacatgccctgtgatattgttcctaatatccagggaggtagaggatgatattactttcaatattgcaggggctgtacaccctctatgatgttgttattaatatttaggttgggagaaaatgatatttttcctaatatcctgggaaggaaaggatgatattactgtaaatattccagggagtgtacaccttcctaatattctaatattgttcctaatatccaggggtgggagaggattatattactcccaatatcgcagtgggtgtacacccctcctgtgatgttgtttctaatatccaagcgaggagaaaatgatatcactctcaataccgcagggggtgtacaccttccccatcatatcgttcctaatattcagagggaaagaagatgatgttactttcaatatcgcaggggttgtacacaacccctgtgatatttctcctaatatccaggaagaaagaggatgatattgctcccattatagcagacggtatacgcctccctgtaacattgtttctaatatcaagactgggagaggatgatatcacttccagtatcgcaaggggtgtacacctcccccgtgatattgttactaatatccagggggaagaggataatattactttcaatattgcaggggctgtacacccccgtgatattgttgttaatatttaggttgggagaaaatgatattagtccaaatatcgcagagagtgtacacacttccgataatattgttcttaatatccatgggggagacgatgatattacacccaatatcgcagggggtgtagtctccccttgtgatattgtccctaatattcagggaagtaaacgatgatgttagtgtgaatattccagggagtgtacaccccctttgtgatattgtcctaatatccgcaggagagaagataatattactcccaatatcgcagggggtgaacacaccccctgtgatattgtttctaatatccaagcgaggagaaaataatattactcccaatgtctcaggggatatacaccttccctatgatattgtttctaatattcaggtggaaaacgggtgatattactcctaatatccaggaagaaaggggattatgttactccccttatagcagggggtatacacctcccctgtaatattgttcctaatatcaaggctgggatatacgtggggggaaggatgatattactcccaatatcacaggggttataaaaccttctgtgatattgctcctaataaccatggcggaagaagatgatattactcctaatattgcaggaggtgtacactcccccattatgttgttcctagtatgcagaaaaggagaggatgacattattgccaatatcgcagggtgtgtacaccacccatgatattgttcctaatatttagagggacagaggatgatattactcccaatatcgcagggggtgtacacgcatcccctgtgatattgttcttgaaatcgaggggaaagagaattatatttctctaaatattgcagagggtgtacaccgccccctgtgatattgttcctaatagccgggggcggggggagataattaaattactttcaatatctcagagagtgtacatcccccttgtgacattgttcctaatatccagagcaaaagagaatgatattcctcccagtatcgcaggaagtgtacatttaacctgtaatattgtttctaatatccagggggaagagaatagtaatactcccaatatcgtaggggttgtacaccttttctgtgatattgttgcaaatatttagaagagagagagaatattactcgcaatatcacagggaatgtatacttcccctgtgatattgttctaatatctagaaaaagagaggataatattactcctaatattgcagggggtgtacacccccacttgtgatattgttcctaatataaaggaaggtcgaaaaacaaacggggagcccagggggaaggaaggcaggcgaggaagaggcagcgccggggcgccggagggagcagccgggccgcggaagcgcgagcacgagaccggtcgcggtcgcagtcgcatttttgccgttgtcgcggccgccgccgccgaggcttacccggggatgtctgagcccgcgcctcgcggcccccaagctccacgctgcgcccgctgtcccggcctctaagggccgccacgtccctgcggcgcgcgcaggcagaaagcggcttcgtgccggcggagggggcccgggcgggccgggaaaggctgccccaggccccgcgcctaccccatcaccgcggccggcgccgggccgggaggatgagcggtgtggggctctgaagcatggagggggttttgtacaagtggaccaactatctcacaggttggcagcctcgttggtttgttttagataatggaatcttatcctattatgattcacaagatgatgtttgcaaagggagcaaaggaagcataaagatggcagtttgtgaaattaaaggtgacagctttggaggggaccacccttgattggatacataaattctgttcattcagcagacaacacaagaatggaattaatcattcctggagagcagcatttctacatgaaggcagtgaacgcagctgaaagacagaggtggctggtcgctctggggagctccaaagcatgtttgactgatacaaggactaaaaacgaaaaagaaagaagtgaaaccagtgaatcgctgaaaaccaaaatgtctgaacttcgcctctactgtgacctcttaatgcagcaagttcatacgatacaggaatttgttcaccacgatgagaatcattcatctcctagtgcagagaacatcaatgaagcctcttctctgcttagtgccacgtgtaacacgttcatcacaacgcttgaggaatgtgtgaagatagccaatgccaggtttaaacctgagatgtttcaacggcaccatccggatcccttagtttctcctgtgtcaccttctcctgttcaaatgaggaagcgttctgtcagccaccctggttcttgcaccagggaggagtagccactgtataaaagaaccagtatctgcacttcaccgactctcccagcgacgccgaagaacctactcagatacagattcttgtagtgatattcctcttgaagacccagatagacctgttcactgttcaaaaaatacacttaatggagatttggcatcagcaaccattcctgaagaaagcagacttatggccaaaaaacaatctgaatcagaagatactcttccatccttctcttcctgaagaaactgtagtgtccaactttctctaagtattgctatgcaaaagctgctgtaattgaactattgttatagggagtagttttttcccttaggactctgcactttatagaatattgtaaaacagacaaacaagaaaacaaaccacatacttttgaagcgtgttttatctttatatagtttgtttgcaagagtattttcctaataacttcacagtatgaatgtgcatcttttttttctttttttaacaaatgatggtgtaacattttgacatccataaggacaaatgtagatatttttctaaaaaaccgtgaggggactgacagcttggtcagggtgtattgtagcttataaacatgaaatcttacaaggtttcagtttgacagaagtgtgatatatgtaacttgtgccatggaccaaatggtcactttaccacagctaaaaatgagttatgatagcagcttgatggtgattgcattgtattcctttaatcaaaaaggaaacgcaatattctaagtatctttagcccaaataccatgacatattgagcatctttaaataaccagactgtattgtccttcatatgtgaagttgacactactgatttgtcaataccaaattttgggttaaagtgtttaatttttatttatttattttcttgttgcctcaaaagatgattgcattctaacttttgtgacctaccaaatttaagatgtgtatacattgttctttacgttgttctagaaaagagattttaatgctgtagtgacttagctcacttacatcagagaaataaacaactttcaatggaaaaaaatatatataaaggaaggaagaggatgatattacttctcatatagaaggggttgtacaccccccttgtgatattgttcctaatattcagggagggagaggattatattactcccaatatagcagggagtgtacacccccccccccgtgataatgttcctaatattcagggaagcagaggatgatattactttcaatatcacagggggtgtgctgtccccctgttatattgttcttaatattcaggggggagaggatattattatgcccgatatcacaggagaagtacaccccacaagtgatattgttcctaatatccaggggtaaagaggatgatatcgcaggtggtgtacacccctccccgtgatattgtttctaatataaagaaggagagagcatgatattactcccaatatcgctggaggtctacaccccccttgtgatactgttcctaatatccaggaagggaaacaatgatattgctgtgaatattccagggggtgtacacccctttgtaatattgttcctcatatccagggggtagagaggatgatattactcccaatatcgcagggggtgcacggccccactgtgatattgtttttcatatccaggaggggagaggatgacattactctcaatatggcagggggcgaacaccccctgtgatattgtgctagttaggttgggagaaaatgatattactcccaatatcgcagggggtgtacaccgctcctgtgatattgttcctaatatccatgacgggagaggatattactcccaatatcgcagggggtgtacctctcccctgtgggattgttcacagtatccaaaagggaagaggatgatgttactcccaatatcacagggagtgtacaccaccattgtgatattgttcctaatagccagggaagaaaacgatgatattattgtgaatattacagggggtgtacacaccccctgtgatatggtttttaatatacaggttggaaaaggatgatattactcccaatatcacaaaaggtgtacacacccccccatgatattgttcttaatacttcggtggggagaaaatgatattagtctccatatcacaggggtgtgaactcctccggtgatattgtttttaatatcaagaggggaggagatgatattgctttcaatatcgctgggggtgtacatccctcctgtgatattgttccttatatccaggcgaggggaaaataatattactcccaatagtacacaccccatgtggtattgttcctaatactcagggggaaagaagataatattactttcaatatcacagggtttgtacacctttcctgtggtatagttttcaatatccagggggaaggtacatgatattactcccattgcagcaaggggtgtacacacctcctgtgatattgttcctaatatccagaagtggtgaggatgatattactcccagggggtgtacaccccacctatgatattgtttctaatatccaggggaaaagagtgtgatattatgcccaatatcgcagagggtgtacacttatcctgggatattgtttctagtatttggggagggaggagaggatgctattattctcaatatcgcagaaattgtacacccccgctgtgatattcttcataataatcagggaaaaagaggatgatattactaccaatattgcagggggttacacttcccctttggtagtgttcctaatatccaggaagaaagaggatgatattaatcccattttccaggaagtgtacacccaccgtgtcatgttgttcctaatatccagcagggaagaggatgatattactcccaatatcggagagggtgtacacttcccctgttatattgtttctaatacccagggggaagaaggatgacattactgccaatatcacagggtgtgtaccccaccctgctattgttcctaatattcaaaaggaaagatgaaaatattactcccaatatctcagggtgtgtacacctctcctgtgatatcgttcctaatatccacaggaagagagaatattactctcaatattgcaggggggtgtacacccccctgtgatattgttccaaatattcgggcggggagaggatgatattagtcccaatatcgcagggggtgtgcaccaacctgtgatattgttcctaatatccatgcgggggaggacgatatcactctcaatgtcgcaggaagtgtacacctctcttgttatatttttcttaatatccaggagggaaaagatgatattactgccaatatcgcagggtgtgtccaccccccttttatattgttcctaatatccaatggaaaagaggatgacattgctctccatatcccagaaggtgtacaacgcccctgtaatattgttcctaatattttgggggaagagaggatgatataacttataatatcacaggaggtgtacaccacccctatgtattgttcctaatatcctttaagggagaggatgatattactcccaatatctcaggtggtgcctattccccctgtgatattgtttttaatatccaggggaagagagtatgatattacgcccaatatcgcagggggcatacaccctctctgagatattgttcataatatatagagggagagaggatgatattacttccaatatcagaggtggggtacaccccccggttatattattcttgatatccaggaggggagaggttgatattactggatatatagcagggagtgttcacatcttctgtgatactgttcctaatatccagaaaagtagaggatgatattactcccaatatcgcagaacgtgtacacctccctgtgatattgatcctaacattcaaaggggagaggatgatattactcaaaacatcacagggcatgtacactcccctgtgatattgttcctagtatccagaagggagcaagataatattactttcaatatcgcagggggtgtacacccctctttggtatgtttcctaatatccagaaggaaagagggtgctattactttccatattgcaaggggtgtacacccccctgtggtatggttcataatatccagggagggaaagggtgctattattccccatatcgcgaggcatgtacaccctgctgcggtacggttcctaatatccagggggaaagaggatgctattacttcccatatcgcggggtgtgtacacccccgtgtggtatgttttgtaatctccgggaacgaagagggtgttattacccctcatatcgctggaaatgtacactcccctgtggtacggttcacaatatccaggggattgagggtgctattactccccatatcgcggggggagtgcacctccctgtggtatggttcgaaatatccagggtaagagagggtgctattattccccattttgcaggaggcgtacacccctctatggtatgttttgtaatatcccaggtaaggggtgctattgagagaagagagcaaaagaccccccccatattgttctgtattattttatactcagtacctgttttaagaagaaacaaggaagcgaaaccaaaggcaggcagcccggcgccaggcaccagatccaaaaccagacccgaaaccaggcctgggccttcctgaccttagcctgaaagttaaaattcaacccatgacctagcaactgatgttatccatagattccagacattgtatggaaggacattgtgaaatttcttgttctgttctgtttcactctgagtactggtgcatgcagcccttgtcacatacccactagattgctcaatcaatcatggccctttcatgtaaaaaccttagtgttgtgagcccttaaaaaggacagaaattgtgcactcaacaagcttggattttgatactctagtctgctgatgcttccagctgattaaaagccacttccttcactacctcggtgtctgtgggattttgtccgcggctcctcctgctacactgtgactccccttatagagaggggtgtacacccccctttggttcctaatatccagcgggggagtaggtgctattactccccatattgcggggagtgtacacccccttgtagtacggatcgtaaaatcaaggagggagagaaggtgtaattatccccatatcacagggagtgtacacccctttgtggtatagtttgtaatatccacgacgggagagaatgctattactccccatatcgtggagggtgtacaccgccctgtagtatggttcgtaatatccggaaggggagaggttgctattactccccatatggtgggaagtgtacacccccatgtgatatggttcataatatccaggggggtagaggatgatattacccacaatatcatagaaggtgcacacccttttgtgatattgtccataaaatccagaaggggagaggatgatattacttccaatatcacagggggtgtgtagccccatatgatattgtttgtaatatcaaggtagggagaggatgctattccttacaatagctcaaggggtgtaaccttcttgtgatattgtttgtaatatccagaaggggagaagataatttttttattttaaaagtaaactttaatgtcaaaaatgcaaacttgagaagggcagaaagatcaaacagaaggctgccacttcacaattggagggttgcacagtggccgggcagaggcgctcctcactccccagacggtgaggcagccgggcagaggtgctcctcacttccgagatgttgcaggagccgggcagaggtgctcctcacttcccagaacagggggctgccgggcagaggtgctcctcactgcccagacggtttgcaggcctggcagaggcactcctcacttcccaaacggagcagcggcaagccagaggcgctccacacttcccagatggtggggcagccgggcagaggcgatcctcacttctcagagggtagggcggcccagcagaggcgctcctcacttcccacatggtggggcggcaggctagaggcgatcctcacttcccagacggtggtgtggccatgcagaggtgctcctcacttcccagatggtgtggccgccgagctgaggcactcctcacttccctgacagtggggcggctgggcagaggcgctcctcacttcccagacacttggactccgggcagagactctcctcatttcccagatggtggggctgccgggcagaggcgctcctcacttcccagacggttcagaggccgggcagaggcgctctggggagaggataatgttactcccaatatcgcagggggtgcacactccctgtgatattgttccgaatatccagagggggaaaggatgatatagctcccaaaatcgtggggagtgtacacccccctgtgatcttgtttgtaataccaagaagaaaagagaatgctattatttccaatatagcagggggagtacaaccccctgtgatattgttcgtaatatctagggggagagaaaattatattagtcttaatatctcaggggacgttcatccccctgtaatattgttggtaatattcagaatggagaagatgatattgttcttaaaatacaggaaaaaatatgataatattacttccaatatcgaagggggtgtacactctcctgtgatattgttcccaatatccagaatgaaagaggatgctattactcccaatatcccagggagtgtacacccctttgccatattgttcataatatccaggggaagacaggataacattactcccaatatcaccgggggtgtccacccactagtgatatttattgttcatcatatccagaaaaggagaggatgatattactcccaatattgcaggtggtgtacggtccctgtgatattctttgaaatatctagaaaaggagaggatgatatcactccgagtatcacagggggtgtacacccccctgtgatattgttcgtaatatccaggggagaaaaggatgatataattgccaatatttcaggggatgtgcacctccctgtgatattgtttgtaatatccaggggtggagaggatgatattactcaaaataacgtaaacatcctgtgtgtacatcccctgtgatattgtttataatatccaggggggtagaagatgacattacccccaatatcacagagtgtacacacccctgggatactgttcataatatccaggcgggaaagaatgaactacttccaatatcgcaggatatgtacacccccctgtgatatatttcctaatatttatgtgggtaaggatattacccccaatatcacagaaggtgtacatcctctttgtgatattattcctaacatccaggaaaggagagaatgatattactcccagtatcgcagggggtgtacaccacccctgtgatattgttgctaatatccagggggagaggataatattactcccaaaatcacaggggacgtacactcctcctgagatattgttcctaatattcatggggaaaagaatgctactactccaaatacagcagagggtgtacaccatccccgtgatattgttttttatatccaaagggtgaaaggctgatattactcccaatatcgcagggggtgtacaggccccccatgatatcattcttaatatccagggaggcaaagaatgatgttactcccaatattgcaggctgtatacaccccccgtgatattgttcctaatatccagagtaagagaggatgacattgctcccaatattgcaggggttgcacgcacgccctgtgataatattactcccaatatcaacagtgggtgtacactcctcctgtgatattgtttgttatatctaagaaagaagaggatgatattactgtcaatatcacagaaggtgtacagccccttgtgatgttgtttctaatatccagcggtgagaggatggtattactcgcaatattgtagggggtgtccaacggccctgtgatattgtttctcatattcaaaaaggaaaagaataatataactccaaatatcgcagggtgtgtacacttccctgtgatattgatcctaatatccaggaagagagaggatgatattaatcccaatatcacagggggtgtacatcgcttctgtgatattcttcctaatatccagggggggaggggatgctattactcttaaaatcgcagggaacttacactcccactatgatatttttcctaatatccaggaagggagaaaatgatattactcctaatatcacatatcacaatgggtgtacatctccccgtgatattgtttctaatatcaaggatgggagaaaattatattactctcaatatcgcagggggtgtgcacacctcctgtgatattgttcctagtatccagcggaggagatgatattactttaaatattgtagaaggtgtacaacccccctttgatattgttcctaatatccagggggaaaggagatgatattactcctaatatcgcaggggctgtacaaccctatgtgatattgtttcttctaatatccaggggtggagaagataatattactcctaaaatcgaaggggacatacactccccctgtgatatttttcctaatatccagaaggaaagaggatgatattactcctaatattacaagaaatgtatacctgtcctgtgatattgttcctaatatccagaggggtaaatgattatattactcccaatatcgcaggggtgtacaccttccctgagatattgtttctaatatgcagtggaggagaggatggtattactcccaacatcacaggagatgtaaactccccttgtgatattcttcctaatgttcaggacgaaggagggtaatattactcactgtattgcagcagggggtgtagagccccctgtgatattgtttttaatattcaaggttggagaaaataatattccttccaatatcgcatggggtgtacacccttctttttatatagtttctaatatctggggggagaggatgatattactcccaatatcgcagggggattacacccccactgtgatattgtttttaatatccagggtgggagaggataatattactccaaatatcccagggctatacaccctccgtgtgatattgtttctaatatccagaggaagagaagatgatattactcccaatgtcacagggtgtgtacaggccttctttgatattgttcttaatatccatgagggagaggatgatattactcccaatatcgcaaagactgtacaccctttctgtgatattgcttccaatatccagggagggagaggatattacactcaggatcacagggggtgtacaccccaacctgtgatattgtttctaatatctagggaaaatgagggtgatattactatcaatatcacaggaggtgtacactcccttatgatattgttcctaatatccaggagaatgacaggataatattactcccaatatcgcgggtggtgtctccccccactccgtgatattgttcctaatacccagagggggagagaatcatattactcccaatatcgcaggggatgtacacctacatccggcggagtagaagataatattactcacaatatcgcaagaagtgttcaccttccctgttatattgttgctaatatccagggagtgagaagatgatattactttcaatactgagcgtgtacactacccctgtgatattgtttctcatatccagtagaggagaaaatcatgttactcccaatattgcaggggtgaacacctcctttgtgatatttttcctaatatcaggaaagggagagtatgatattacccttaatattgacaggggtgtacacccccctttgatattgttccaatatccaggggggcagaggataatattattcccaatatcgcagagggtgtacaccccccgtgatattgttcctaatatccagagaaataaaaaatagtattatttccaatatcacagggcgtacattttccctgtaattttgttcctaatatctggggggtggggtggcaggataatattactctcaatattggagagggtgtacacccccctgtgatattgttcctaatattcagggtgggagagaatgatgttactcccaatatctcaggagtcgtatacacccccttgtgatattttttctaatatccaggaggcagaggatgatattgctcccaatatcgcagggggtatacacccgagctgtgatattgtttctaatatgcaatatgggggaaggatgattttactttcaatatcgcagggaatgtacactttccttgtgattttgttcctaatatccaggggtggagaagatgctattactatattactcctcatatcgcaggcggtgtacaactccctgtgatatggttcagaatatccagagtgaaaaaggagggtgacattactcccaatatcgggggggtgtacacccctttgtgatgtggttggtaatatccaggggggcagatgagggtgatatcactccccatatcgtggaaggcgtccacttttttgtgatgtggttctttatatcccgaggggagaaggtgatattactccccatatcgcgaagggcatacacccccctgtgatatagctcataatattccggagagtggaggaagatactatgccctatatcgcgggtggcctacaaccccctatggtttggcttataatatccaggggggagagggtaatattgctccccatattgtggagacgtacagccccctgtgatatggtttgtaatatctttggggggcgagggtgatattactccccatatcgcggggagcatacacccccgtgatctggttcatagtatctcaaaggaagaagttgatgtgtacaacttaagggaaaaagttgaagtgaagtgtacacacgccctgtgacgtggttcataatatccaggcgggggagaggagagtgatatttactccccatatcgcgggtgttgtaaactcccctgtgatatagttcataatatccaggggagagaggagggtgatattgctcctcatatcgcgaagggtgtacaaccccctgtgatatggttcataatatccagaagggtagaggacgatgatattactccacatatcttgggaggtgtgatatggttcgtaatatccagcgatgagagaatgatattactccccatatcgcaaaaggtgtgatagggtttgtaatatcctgagggggagagggtgatattaatccctatattgcagaaggactacaccctcccatgacatggtttgtaatatcccagggggtagagtgtgatattactttccatatcacagggggtgtgatatgattcgtaatattcgaagggggagagggtgacactactctccatatcacggggtgtgtgatatggttcttaatatcccaggggttagaggttgatattaccccctttttggggggtgtgtacaccccctgtgatatggttcgtaatatcccgggggagacagggtgacattattccccatatcgaggggatcgtacaccccctgtggtgtggttcataatatccctagggggagatggtgatattactccccatatcagggggcgtgcactcttctgtggtataattagtaatatccagggggcagaggtcgatattcgtttccatatcatgaagggagtacacttccctgtgatatggttcctaatatccaggggggagagggtgatattattccccatattgcggggggacatacaacccctgtgatatggttcataataaccagaaaagaagagggtgatattaatccccgtattgcagagggcatacaccccccctgtgatatggtttgtaatatctaggggaggaaaaggtgatattactttccatattgctgggtgcagacacccctttatgatatggttcataatatccaagttggagagggtgatattacttcccatatcatgggaggtatacccttccctgtgatatggttcgtaatatccagaaggggagagattgatattactccccatattgtggggggcgtacaccttcctgtgatacggtttgtaatatctaggggatatagtgggtgatattactcaccatatcacgggggttgtaacatggtttgtaatatccaggggaggagagggtaatgttactccccatatctcggggcatgtacaccctcctgtgacatggttcgtaatatccaggtcgggagagggtgatattactcctcatattgccgggggtgtgttatggttcataatatcctggggaaggaggctgctatcactctccacatcttgggggatgtacactctcctgtgatatggttcataatatccagggtgggtgagggtaatattactccccatatcgcgggaagtgtacatacccctgtaatattgtttgtaatagaagagagggtgatattactccccacatcgcgggtggtgcccacccccctgtgatatggtttggaatatccagggggatgaggagggtgatattactccccatatctcggtgggagtacatccctctttgatcaagttcataatatccaaaaggaaacaggagagtgatattactccccatatcgccgggggtgtacacgggagggggagtacacccccggcgatatggtctgtaatatccagggaaggagaggagggtgatattactcaccatatcgcaggtggtctacatttacctgtgaaacagtttgtaatatccagggggggaaatgagaatgattttttttttttgagtctcactgtgtcacccaggttggagtgcagtggcacgatcttggctcactgcaacccccgcctcctggactcaagcaattctcctctcccagcctcctgaatagctgggactacaggcgcaccccacaacgtctggctaatttttgtatttttattagagacggggtttcaccatattggccaggctgatctcgaactcctgaccctgtgatccatccgcctcggcctccaaaagtgctgagattacagatgtgagccaccacgcatggcccaaggagaacgatattactccccatatcccagggggtgtatatccccctgtgatatggttcagaatatccggaaggaaagacagggatattacttcccatatcgcaaggggtgtgacatggttcgtaatatcccatgggggagagggtaatattactcttcgtattgtgaagggcatacactcccctgtgatacagttcataatattccggggagtagaggaagatattatgctccatatcgcgggtggcataagccccctgtggtttggttcataatatccagggaggagagggtaatattactccccatattgtggggacgtacaccctcctgtgatatggtttgtaatatcccagaggggagagagtgatattactccccatattgcagggacatacacccccctgtgatatggttcaaaatgtcttttttttttgaaggactggttctttatttcaaaaagacacttgtcaatattcattatcaaaacagttgcactattgatttctctttctcccaatcggccccaagtagaccacatcaaaggagagtacatattaagccaataagctgtaggatgtacacctaacagacctcctagaaaccttaccagaaaatggggacagggtagggaaagaaactttaaaagatcaacaaactgccagcccacggactgcaggggctgtcacagccagatggggtggccagggtgccacaaacccaaagaagcaaagtttcaaaataatataaaatttaaaaagttttgtacataagctattcaagatttctccagcactgactgatacaaagcacaatgagatggcacttgtagagacagcagcttcaaactcagaaaagggtaatgagatgagtttcacatggctaaatcagtggcaaaaacacaatcttctttctttctttctttctttcaaggaggcaagaaaagcaattaagtgctcacctcaacataaggggaacatgatccattctgtaagcagttgggagggggtagagatggaacaaaattttggtctcagaggtcttgccatcttaatttggtcacttctaatgaaaaaaataaaaaatagaaataacattatccaaaggtatcttaaagctgaaaacttgaacagcacattttttgttgttgttgtttggctaactcctcctggaaccacctttctggcttagctagtactttgtacagagcaatgaggcttcccatagtggagtctccctgggctctgtttggctctcagcaaggcaggcctataccttttcctctcctccatggagagaggaatatgcattaaggtgaaaaatcaccttccaaaagtgagaaagggattcgatcgctgcttcagggctgtggtattatatggaatgttttacaaaaggttgctacaaaacaacaaaagaggtaattacaaaatgtgtacatcacaacatactttttaaagacattatgcattgtgctcacattcccttaaatgttgtttccaaaggtgctcagcctctagcccagctggaatctccgggaagaggcggacagtttggtgaaaaagacacagggaaggagcgggcggcggaaggagggggcggcgaaaggagaaagcagccttccagttaaagatcagccctcaattaaaggtcagcttcgggcaggctggcctcaggcggagtctggttcagagggaggagcagcagcagggtgagactgaggcgttctacatctcattcaggtcaagcagagtctggtccagcatcctttgtgtacagaggtgctcccctttggtgcatttcagtttatcttccaagtcatcaattgtcttttccagcttggctaccgatctctcagcaaactcagcatgggtctccgcctcctttattttatcagtaagaatcttgatctcttcctcatatttgtcttctttttgagagtacttttcttcagcagcactcagacacttcaggttctggtccatcagtctaatctgctcatccatctctcggcaaagggattctgccagctcagctcgttcctctgtgcgttccaagtctccttcaatgatcaccaacttacgagccacctcttcatacttcctatctgcctcttctgcaatgtgcttagcttctctgagttggatttcctggagttccatcttttcttcatcttttaaggcccggttttcaataaccttcttacctctctcactctcatcagcagctttttccgcttcttccagcttttgcagggcagtagccaggtgctcctgagcacggtccagctcctcttcaaccagctggatcccacgttcaaggaggccacctcagcctcagcctgttcccgggcccacctttctccctcaacttctcgctggaggcgctcagctcgctcctctgcatcatctgcctgctgctgcagaacctggatcttgcgcttcaccgcctcgatggtggtgatcccagccatggtgcccacccagctactgctagagctccggttcctgcctcctccgatcggcgttgcagcctcctctcacccttacttccgcctcggttcaaaatatcttaagggaaggagttgatattactccccacatcacgggaagtttacatcccctggtgatatggtttgtaatatcccagggtggatagggtgatattactctccatatcgcgaaggagtactcccccctgtgatatggttcataatatccttggggggagagtgtgatattactccccatatcgcgagggccatatactcctttgtgacatggttcgaaatatcccggtgggggagggggtagagggtaatattactccccatacagcgaagagcatacgcccttctgtggcaaggttagtaatacttcagggaaaagagtgcaatattacttttcatattgcagggaacatacactcccctgtgacatggttcgtaatatcccgggggctgagagggtgatatttctccccatatcaccgggggcctacacctgggtgtgatatggctcataatatacagggagggagagggtgatattactccacataccgagtgaggggttacacaccctcgtgacatgttcgaaataccccaaggaggagacaatgatattactttccctgtcgcgggggctacaccctcccagtgatatggttcacaatatcccggggtggagagggtgatattactccctatatcaccggggggtgtacacttccctgggaaatggtttacagtatccccggggggagagggtactattactccccatatcacgttacatatcagggtacacccccacgtgatatggtttgtaacatcccaggaggaagaaaatgatattactccccatatcgcggtggcatacacccctccccgttaaatggttcataatatcttggggtggagagggtgatattactccccatatcacgtggggcatacaccccactatgatatggttcataatatcccggaggggagagggagatattactctccatgtcgcggggggcatatacacccctgtgatatggtttgtgatatcccgggggcggagagggagatattactctccatatcgtggggtcgtacacttttctgtgatatgattcgtaatatccagacggggagagggtgatattacttcccatattgcgggggcgtacacccctctgtgatatggttcataatatcccgaagaaaagagggtgatattactcctcatatcgcggggaacacacaccaccctgtgatatggtttgtaatattcagcgggggagagagtaatattactccctgtatctcggatggcgtacactcccctgtgatatggttcataatatccagaagaaaagagggtgatattactccccatattccagggaatgtacaccaccctttgaatatggttcgtaatatccaggaggggagagggtaatattgctcccaatatcgaaggaggtgttatacggttagtaatatccagagaaggagagggtgacattactccccacatcgtggtgggtgtgcacccacctgtgatatggttcataatattcaggttaagagaggtgatattgctttccatatcgccaagggtgtacactcccgtgaaatacagttcgtaatatccaaaaggggagagggtgatattactcccatatcgtggggggtgtacacccctctgtgatatggttcataatatccagggtggaataaggtggtattactccctgtatctcggggcatgtacatcgcctgtgatatgattcataatatccagaagaagagagggtgatattaatctccatattgctgggggtgtacaaccccctgttgtatggtttgttacactgagttggggagagggttacattactctcaatatcgagtggggcatacacacttatgtgatatggttcataatatcccagggaggagagggtgatattactccccatatcgcgggaggcatacaccccaatgtgatatggtttgtaatatctacatttttttttttgagacgaagtctcgctcttgtcccccaggctggagtatgatggccggatctcggctcactgcaacctcagcctcccgggttcaagcgattctcctgccttggtcccccaagaagttgggattacaggcgcacaccaccacgcccggctactttttgtatttttagtagagaaggggtttcaccatgttggccaggctggtctagaactcctgacctcagatgatccacctgcctcggcctcccaaagtgctgggattacaggcgtgagccactgcacctggcctggtttgtaatatctatgaagggggaaggtgatattactttccatatcacgggaggcgtacaccacgatgtgatatggtttgtaatatccagggggtatactgggtgatattactccccatatcgcggggagtgtatacccttttgtgatatggttcctaatattaagctgaggagaaggtaatattactccccatatcgcaggggtttttatatggttcataatattcaggaagagagagggtgacattactctccatatcacggggtgtgtactcccccatgtgatatggtttgtaatatccagggaaggagaggttaatattactccccatatcgcagggggtgtacacctctctgtggtttgtaatatccaaagggaagaggatgatattatcttcaatatcttggggggatacagtccccagtgatattgttcataatatccagagggggaggggatgatattactcccaatattgcaggtggtgtacaaccccctgtgatattctttataatatagagggggatgatgatattactcccaatatagtaaacaacctgtgtgtacaccccctgtgatattgtttataatatccaagggtggaaaggatgatattactcctcatatcgcagggggtgtatacccctctgtgacattgttcctaatattcaggggaggagaagatgatactactcctcatatcacaggggatgtacacccccctgtgatacttttggtaatatccaggggaggagaaaattatattattccccatgtcacagagggtgtacaccccgctgtgatagtgttcataatatccaggtgaaaagaggatgatattactccgaatatctcaggaagtgtacacccttctgtgatattgttcataatatccaaaggtggagaggaggatactactccccatatcgcagtgggtgtacacccccctgtgatatggttcataatatccaatgtaggagaggatgatattactttccatatcgcggagagtgtacatccccctgttatattgtttgtaatattcagggagaaagaggatactactactccccatatcacacggggtgtatattcccctgtgatatggttcctgatatccaagagatattataatcctctcttggattatgctacctctcatatcgcatggggtgtacacacactttgtgatatcgtttgtcatatccaaggagggagaggattatattaatcccaagatcacggggggtgtacaccctcctgtgatattgtttgtaatattaaggggggagaggataatattactcccaatataattaacaccctgtgtgtactcctccttgtaatattgttcataatatccaatgggggagacgatgatattactttcaatatcgcagaggatgtacatccctttgtaacaatgtttgtaatataaaaggcaagagaggatgatactacttccaaaattgcaggacatgtacaccccccggtgatattgttcctaatatccagtggggaagaggatgatagtagtcccaatatcgcaaagggtgtacacaccccctgggatattgttcctaatataaaaggaggagaggatgctattattcccaatatcacagaaggtgtaaaatcccctgtgatattgttcgtaatattcaggaggggagaggattatattactcccaatatcacagggtgtgtacacagggaggggcaagggccagaagcgggcgggaatccccatgtttgggcggacccagtttctaatggccagcatttgccaatcaaagcttaccagagaactctaaaagccagggctttcctgctagacaagactcatttctggaactgctttaaaaagaaacaaaacttcccaaggaccccttttcctctctgtctgcctaaaataatgttttaaaaactcctaaagcagctgaattcagcccccttcctgggggaatgtatagacggaactcccacctttcccggcatcccaaggccagagtatgtgaaactcctgggtctctatgtgtgtctgagcggctgctctgccaacactccacacagccctgtgtcctggacccaaggcccttatgacctgagctcaagaggggatctcctgatccatgggttgcaaagatccatgggagaagcatggtttctggggcggggtcacacgctcagtcactgtttccctcggatgccggagatggttcctttggctctctgccaatacagggtgaatcatcatccatccctcttttctttgttctcccgggtcaagttgtttgcctagtcagtcccaatgtgagaacctgaatatttcagttgacgcgctgacttcaaaatccccgggcttcgggaggcggagcttgcagtgagccgagatcccgccactgcactccagcctgggcgacagagcgagactccgtctcaaaaaaaaaaaaaaaaaaaaaaaaaaaaaagtccccgggcttttcttttcactcagtggaaggcagctgcttctaattggccatcttggcccgcccccaccacgtgaccttctgtaaaatgcctccactctccaggaacgctctcattatataactttgcctgaaaccaacagcacgctcattgcacatatcatgggctcatttatttcacttataaagaacctggccaaggaagagatagtgcctaaagtggccagtattctgaccgatatgttagaaaaatggtgtgccgaccaattcatgacatgtgtcccaaaactagcaacggaaattgtattcgccgtgttgaggtctctaatccagatgatgctcatctatgtactggaaaaggcagagtcctttcctgacaagctgctgaaactcttcagaaacatctcatatttcctgaagaagatgatgtctggacaagcagcacaggtcgttcagatttaactttctattcatatatccagcacgatattcgcacaattgtcacgaaaccttaccagttgatgagtcctgcacatttcctttaatttcaggaggaagagggtaatccggatgagttttctgacctactctgctgctgtgattaaacaaccaccaggaaattttgacgacactgttctcctgagctcctccctttcctccgggaacaaaacaattgaatttacaaaaataaagtgttatttgactggagtgaggtctcatgtctgcttatgcggtggctcgctgctcagaacagggtgagtctctgggttgtgtgctgaggaggggaggctctcaatctggagaaaacccactgcaggggacacctccatggggtctgagggactgaggatgaggagccggactgggtctagggaaggaggaggtttcagagggtgaaattctggcactaaagcctgggggtgtttgggaacttcctccttccgaagaagtttcagggagggataaagacaaaccctgggctccttgaggggcccttactaatttgagaggactctatcgggaaggagagtgacaatggcctccttgaggactgaggcccctgaataaatgaggcccagatacagtccatgggggatgagaccttcaagggtcacattttggttgggacagaggaaaagtgcagctctgcagccgcagaggaaaacccggcagtgtgaaagcgaccttggaggggccctgtgcgctctgaatgcgtctgagcccccatcccctgtccccgcctctctttctggattcttccagctcggctgtctccgccatcttctgagcgctccaccctgacttattcaagtttcccttctgccttccaagtactccaaaatctttcagatctgtgtccctacccctgtttttagcatgtgttggggctccaggtccctgaaggtttctggcctgaaatccacctccccagcggagtggactgcgttctagagactccacactccgcgaggttcccaggcccctgagggacaaccgagtggcctgcgcacttcagggctccacactcggcaaggtctttcaagcccttggggtccccttcttagttttttccacctttctgggctgcagtcactccataaatgctgggatctgatccccacccccactctcgtttcctcaattctgcgggctacacgctctggcaaggtcctccgggccctggatcccctccctctccctatgcccacgctcctagtcagcccttctggggtccactattttcaggaactaaccgttctcatggagccttgctaaccggaaagctgtgtggaagaaaggctttgaggatagaggtggagatttggctcttccatagtgccactcacccaccccaccatgctgccactgccagacccggacccctgtttcagaacaagtgaccagattcgctcctggacagccctggacactggccttttctctgaaaactactcaccctttctctagtccccacttcatgccagcctcataccctcttccttcccccacgctggcttccgggatcctcctctgctcagacaacctcttctgtgtcccacccccgtttttagaatgctttggggcaccaggttgggggaaggtttctggcctgatatccatctctttccaaactcccttcttcccttgaaaggcttcttgccttcagccccacttctggctccgaggtttcaggacaccctcctcttcatcctcattcttttgaccaccagctttttaggaattcgaacgtccctctcatcttcgtgaatcctgtccaggcatttgttgaccccttcatctgatacccctgacctcacattgccaaaagtctacccctacccagtacactggaattagacaaaatcccaggagttttacctcaactctgagtgtgcccacaggagctctccctgaagccacgtccttttaagcagggtctagggttcctcccttgtcttaatgaactctttgtcacacggaggacgttatggagcccttatgatctttcactgcctttctgcccagcgttttgtctttccatggacatttataatattttccatggacattttgttctctcaatgtccacccctaatttccaacatcccaaagattctcatgtgtttcctgaaagccatttacaggaatggctgtgcccagacccccttccccaggatcctccttcacacctggtaggtgcctctcctagagagatttgcactcagttgtcgtgcagtcacatggcccagatggttgttaatcacccccttcctggcaacagctagcagccagggaatcactggcacagaaacctcagggtgaccaagatgaggccacctctgtgctgaaggctgtgctccagagcctgcttgggatcaggcttaagcaggtcttcagccagacctgatgttacctggtttccttgagctgccctgcctgagctatcgggagcactccctcaatgcacatcttgattccctatctcatgctctgcttctagaaaccatgagctatcaattgctactggcaatggtcctgggaagtcaaccctaagtatggattctggggttggatgactccccacaggacttcagtgagcaacaatcactgctggcagttggaggacagagtcgctagggcatgtgaccactgtgaaaccaccgatgtttcacctggggtaattttggatgaactacggtagaagcactgaaggtacattgcttttggtttggaagattgtaggtaaataatagcgatatgaatgtggaattggatggctgcaaacgagtgccattgatgcattgaaagaggaaaagtcaggctgtcacctgtcactcagcaatttaaagtgtgagagttgggactagatgtggtggctcacatctataatccagagattcgggggaagcttgaagaggtaggatcttttgagtccaggagttccagaccagcctggacaccagagcaagacctcatctctacaacaaaattttcttaaaaattagatgggcttggtggcacgcacctgtacttgtagatctagctaatggggagcatgagataaaaaaatcacctgagtcagggacttaggggttacaatgaggtatgattgtgccagtgcacacactcccacctggccaacagagtgagattctgcttccaaaaaaataagaaataaatcaggtttgagagttggaaagcatcatcttctcctagagccaaaggacatgtacaactgagacccaggaacaaagcttcatcacaaagagaccatcatcagtggagccgggagatgcattccccctcaccctgccttgaggaggcagtggagtcatctgtctgggatcctttctgacccagccctatttgtttgtctctttggcttctttggatttgtatattttagctgttataacactgtaaaacaaacagagtgatttttttgagttgtgtgaatgatgctagctccatagtcaccctgagagtgatgggaacttttgaatttgtggcaagttggagggtagtgtaagtgacctgagattgccaaattggggctagcactggatgtgaggttaggctagtggaaaaatatgcccagaaccagaggagtgtgggctcactgcaggtggttaggctcagatccaaattgtacagatggatagctttggggtaaagaataacatagttgagaagtgcatgtgttagtctgttcatgcactgctataaagaattacctgagactgggtaattatttataaaactcaggtttaattgggtcatggttccacaggctgtacaaaaagtatgatgctggccatcagctcaacttctggggaggccccagaatagttagagtcatggcaaaaagtacaagggaagcaggctcatcttccacggccagagctggagcaagtggtaggagaggtgatacacactttcaaacaagtaggtcttttgagaactccatcaccggacagcacctatgggatggtgctaaattattcatgaaatatccgcctccataatccactcaactgtcaccagcgcagccagccccacctccaacagtggggattacaattccatatgaggtgtgggtggggacacagctccaacctcaatcagtgggcatcctggattgggtctactatagaaggagaaccaggagctgactatgatcttgaaccctacccatgatggccgggcggggtgactcatgcctgtaaccccagcactttgggaggctgaggtgggtggatcgcctgaagtcaggagttagagaccagcctggccaacatggtgaaaacctgtctctactaaaaatacaaaaaattagaccggcgttgtgctggatgcctgtaatcacaccactacgctccagcatgggaaaaaataccaaaacttcgtctcaaaaaaaaaaaaaaaaaaaaaaaaaaaaagactgcccatgaccactgcaccagtgagagggacaccagcatcactgagatgcaagggctggacattcttcataggtcagagctcaaagcaggggacactgatacagagatgggctccatccatagcaccaaagtggtgagaggatgtgggaatggcagaggccagcactttgccatcaatgcaagggggtataaggaggtgacaccagtgccagagtacatcacggggggactgccctacaatatctaggacttacctcttagagcgtgtttcattagcgacaacagatataaatggcagacaggtgtgtccctgcattaacaggaaatagaaatcatcaagaggaacagaaggcagatgtcagcagccccttagaaagtcatcatccttcatacagttaaaatctgagacagttctcacacgagaaggcctaactcaaaaagaggctgggttctcatgaggcaggtttatgcaaaaccaaggaaggtgtacaagtttggaattctccagtttcccttggaaaagacctacagtcatttgcttaggtaactgagcactgaacaaaggtgagtattgttgtcttttagaagctcttggccaagaaggccttgttggcataaaacccatggtttggaaacatcaccatgacccctgttagagtaatggcctaagggtgggggtcaggaaattgatgtattccttgccaacttctgcctctaagtgagtgaactctgtttgtgaacctctctcctctgtggttatgttcctaggctctcatgtataatcaggagtcatagacttagaaacaggaaaaatacttacagtgtttttgtggcctgtgagctatgacttataattttaggaaaaaaacaattgcaaatggaaagcctaagtctatcaatgctcatccaagacaacataatcaataaaaaccaatatcaaatctcaaggcaaattatttcctgtatatagatggcagagatgagcaccaccatcaaaaactcaaggaccagtgctgtgggtccagtcatctgtttcatggaattcaccagtctggtatcttcaaaatccagaaggatgatggcagatggcaggaaagtaatgcaaacgtcatcaggtgtgaccccactgtagcagctgtgatggatgttttctctcaccatagcaataaataacacaacctcggtcacactgtatgcattgttggtctgcaaaatccatgttttgcaaaactcttcaggaaggtggatctgtaatattggcattgacatgagaacaacagcagtatttattcacaatctcaagctctctgtcttcccgtctctctcattagccatccaagtagtcctgaggaaccaagcccatcagaacattctgcaacataatacacagctccattctccattcaaattttgttgttgttgttgttgttgatgagacaacatcttactccatcagccaggctgacgtacagtggggctatctgggctgactgtagtcttgagcttccaggctcaaggcatcctctcacctcagcctcctaagtggcttgaactacagacacacagcgacatgctgggctagtttttgtatattttgtagagacgtgctctcaccatgttattcaggctggactcaaactcctgagcgtaagtgatccaagcaccttggcctcaaagtgctgagattacaagcctgagccactgcacccagcccaatctccattctactgataacaatgtcattaccaggtctgatggacaggaaatggtaaggtttctgaaaacctaaggatcacacagcgagttccaaaggctgaaagtgcatacctgtcgacactgataccaatgacatccaatggtgagaatgacattccttgtagtcctagctctgctcataacaaatctatactgaagtgtaagagtttgatggtcatggggattttccatgtctctgcctttcagcgatgtgccatatctgtgaagtgttcagaaatgcaacagcctgaggcatgctgggcatatcctctaataaaaaggaaaatgccattttatggtcctgtatttctacaagttggaacacatgggcctgtgatccagatgggggaaatgggaatattcccactcattcaccttcatccacgaagcccatttgaaagctttgggcttcccatccttgtagattttagtgttgtgggctgggtgcagtggctttcacctgtactgccaacactttgggaggcctagacaggtgaatccactgaggccaaaagttcgagaccagcctggccaagatggtgaaaccccgtccctactaaaaatacaaaaattagcaaggtattggggccagcacctgtaatcccagctgctcgggaggctgaggctggagaatcgcttgaacccaaaaggcagagactgcagtgacccgatcctgcctttgcactccacctgggcaagcagaacaaaacttctgtcttgaaaaaaaaaacaaaaaacgaacaaaaaagatgttagagttctgggtttagaggtctataccccagaaagagaatggtttcaacaagggacaaagaagttgctttaaacgttgacttgccatttcttttcagtgtgtttgttctcttgcgtcaagagaccaccagaaaagtggtgcaattactctcctgtcaagaatcattgactatcatctgcaagagggtcagatcctggtatataattagggcagaaatacttagtctgagaagggtatgacatccagaggccctattaatgatgtccttttctccatgcctgactctgaccccatgtgctggactgcccctgtgtggatggcctcatggcctgctcggactctgaggtcccaccccaagtggcacctccatggagggctctactcttgtatgggctctgacactcacactgagacactctcccatggacacctcttcacccacttggggtctgaaactgggctactccatccctccctaacctggaacagagagctttcactgctattacacaagtcatagaggctaactcctcatttttccaagctaattattgaaacattagtcctgggttgataagacaagataagttaacttttcataaatttgcttatcaagttttgaataaattcaaataaattcaccttccccacacaccttagttgtcgacatcacacgcgcacccatactcacagggtgagcacgaaggcttcactgtcagtggagaaagtggcaaaacccttctgtgcctcatcctggtctagacctggccctcatcctttcccactcttcccctcactcccttggattcatccacactggcctcctgcctgctgctccacctccctgcgaagctcacccctgcctcagggcctttgcacgtgcagtggcttcaagccatatcctcttcacccagatctcccagatctcctgaatgatcttcttttatcattcaggtctcagcttgcatgtaatcttctcagtgaggattacccaaaccacatagttcattcattcattcaaatattcattcaatggcatattgacaaagcagctacttcatgccaggccttgggccaggtgttatggatatggcaacaaacaaaacaagagttttctgctctcaaatttttacccacttaaaggagatatcatacatcatctgtaaataaatacatcatctgtaaataatgatgtaaataaatacatcatctgtaaatctgtaaataatgatgtaaataaatacatcatctgtaaataaataaagtataataaaagaaaatagtaggtttttttggttggaggtgaccgtgaagtttgcaaataccatcttacaacacattattttattttatttcatttcatttttaattttattattattatactttaagttttagggtacatgtgcacaacgtgcagatttgttacatatgtatacatgtgtgaagttggtgtgctgcacccattaactcgtcatttagcattaggtatatctcctaatgctatccttcccccctcccccaccccacaacagtccccggtgtgtgatgttccccttcctgtgtccatgtgttctcattgttcagttcccccctatgagtgagaacatgcggtatttggttttttgtccttgtgatagtttgctgagaatgatggtttccagcttcatccatgtccctacaaaggacacgaactcatcattttttatggctgcatagtattccatggtgtatatgtgccacattttcttcatccagtctatcattgttggatatttgggttggttccaagtctttgctattgtgaagagtgccgcaataaacatacgtgtgcgtgtgtctttatagcagcatgatttataatcctttgggtatatacccagtaatgggatggctgggtcaaatggtatttctagctctagatcactgaggaatcgccacactgacttccacagtggttgaactagtttacagtcccaccaacagtgtaaaagtgttcctatttctccacatcctctccagcacctgttgtttcctgactttttaatgatcgccattctaactggtgtgagatggtatctcactgtggctttgatttgcatttctctgatggccagtgatgatgagcatttcttcatgtgttttttggctgcataaatgtcttcttttgagaaatgtctgttcatatccttcacccactttttgatggggttgtttgtttttttcttgtaaatttgtttgagttcattgtagattctggatattagccctttgtcagatgagtaggttgtgaaaattttctcccattctgcaggttacctgttcactctgatggtagtttcttttgctgtgcagaagctctttagtttaattagatcccatttgtcaattttggcttttgttgccattgcttttggtgttttagacatgaagtccttgcccgtgcctatgacctgaatggaaatgcctgggttttcttctagggtttttatggtttgaggtctaacatgtaagtctttaatccatcttgaattaatttttgtataaggtgtaaggaagggatccagtttcacctttctacatatggctagcctgttttcccagaaccatttattaaatagggaatcctttccccacttcttgtttttgtcaggtgtgtcaaagatcagatagttgtagatatgtgacattatttctgaggactctgttctgttgcattggtctatatctctgttttggtaccagtaccatgctgttttggttactgtagccttgtagtatagtttgaagtcaggtagcatgatgcctccagctttgctcttttggcttaggattgactttgcaatgcggggtcttttttggttccatgtgaactttaaagtagttttttccaattctgtgaagaaagtcattggtagcttgatggggatggcattgaatctataaattaccttgggcagtatggccattttcacgatattgattcttcctacccatgagcatggaatgttcttccatttgtttgtatcctcttttatttcattgagcagtggttttagttctccttgaagaggtccttcacatcccttgtaagttgggttcctaggtattttattccctttgaagcaattgtgaatgggagttcactcatgatttggctctctgtttgtctgttattggtgtataagaatgcttgtgatttttgtacattgattttgtatcctgagactttgctgaagttgcttatcagcttaaggagattttgggctgagacaatgggttttctagatatacaatcatgtcgtctgcaaacagggacaatttgacttcctcttttcctaattgaataccctttatttccttctcctgcctaattgccctggccagaacttccaacactatgttgaataggagtggtgagagagggcatccctgtcttgtgccagttttcaaagggaatgcttccagtttttgcccattcagtatgatattggctgtgggtttgtcatagatagctcttattattttgagatatgtcccatcaatacctaattattgagagttttcagcatgaagggttgttgaattttgtcaaaggccttttctgcatctattgagataatcatgtggtttttgtctttgggtctgtttatatgctggattacatttattgatttgcatatattgaaccagccttgcatcccagggatgaagcccacttgatcatggtggataagctttttgatgtgctgctggattcggtttgccagtattttactgaggacttttgcatcaatgttcatcaaggatattggtctaaaattctcttttttggttgtgtctctgcctggctttggtatcaggatgatgctggcctcataaaatgagttagggaggattccctctttttctattgattggaatagtttcaggaggaatggtaccagttcctccttgtacctctggtagaattgggctgtgaatccatctggtcctggactgtttttggttggtaagctattgattattgccacaatttcagatcctgttattgctctattcagagattcaacttcttcctggtttagtcttgggaaggtgtatgtgtccaggaatttatccatttcttctagattttctagtttatttgcgtagaggtgtttgtagtattctctgatggtagtttgtatttctgtgggatcagtggtgatatcacctttatcattttttattgcatctatttgattcttctctctttttttctttattagtcttgctaccggtctatcaattttgttgatccttttaaaaaaccagctcctggattcattaattttttgaagggttttttgtgtctctatttccttcagttctgctctgattttagttatttcttgccttctgctagcttttgaatgtgtttgctcttgcttttctagttcttttaattgtgatgttagggtgtcaattttggatctttcctgctttctcttgtgggcatttagtgttataaatttccctctacacactgctttgaatgtgtcccagagattgtggtatgttgtgtcttttttctcgttggtttcaaagaacatctttatttctgccttcattttgttatgtacccagtagtcattcaggagcaggttgttcagtttccatgtagttgagcggttttgagtgagtttcttaatcctgagttctagtttgattgcactgtggtctgagagacagtttgttataatttctgttcttttacatttgctgaggagagctttacttccaagtatgtggtcaattttggaataggtgtggtgtgatgctgaaaaaaatgtatattctgttgatttggggtggagagttctgtagatgtctattaggtccgcttggtgcagagctgagttcaaatcctgggtatccttgttaactttctgtctcattgatctgtctaatgttgacagtggggtgttaaagtctcccattattattgtgtgggagtctaagtctctttgtaggtcactcaggacttgctttatgaatctgggtgctcctgtattgggtgcatatatatttaggatagttagctcttcttgttgaattgatccctttaccattatgtaatggccttttttgtctcttacgatatttgttggtttaaagcctgttttatcagagactaggattgcaacacctgcctttttttgttttccattttcttggtagatcttcctccatccctttattttgagcttatgtgtgtctctgcacgtgagatgggtttcctgaatacagcacactgatgggtcttgactctttatccaatttgccagtctgtgtcttttaattggagcatttagcccatttacatttaaggttaatattgttatgtgtgaatttgatcctgtcgttatgatgttagctggttattttgctcattggttgatgcggtttcttcctagccttgatggtctttacaatttggcatgtttttgcagtggctggtactgactgttcctttccatgtttagcgcttccttcaggagctcttttagggcaggtctggtggtgacaaaatccctcagcatttgcttgtctgtaaaggattttatttctccttcacttatgaagcttagtttggctggatatgaaattctgggttgaaaattcttttctttaagaatgttgaatattggcccccactgtcttctggcttctagagtttctgccaagagatcagccgttagtctgatgggcttccctttgtgggtaacccgacctttctctctggctgcccttaacattttttccttcatttcaactttggtgaatctgacaattatgtgtcttggagttgctcttcttgaggagtatctttgtggcattctctgtatttcctgaatttgaatgttggcctgccttgctaggttgcagaagttctcctgggtaatatcctgaagagtgttttccagcttggttccattctccccatcactttcaggtacactaatcaaacgtagatttaatcttttcacatagttccatatttcttggaggctttgtttgtttctttttactctctttcctctaaacttctcttctcacttcatttcattaatttgatcttcattcacttatatactttcttccacttcatcaaatcggctactgaaggtattgcatgcatcatgtagttctcatgccatggttttcagctctatcaggtcatttaaggtcttctgtacattgttttctctacttagccattcgtctaatcttttttcaaggtttttagcttccttgtgatgggtttgaacatcccctttagctcagagatgtttgttattactgaccttctgaagcctgcttctgtcaacttgtcaaagtcattctccatccagctttgttccattgctggtgaggagctgcgatcctttggaggagaagaggtgctctggtttatagaattttcagcttttctgctctggtttctccccatctttgtggttttatctacctttggtctttgataatggtgacctagagatggggttttggtgtggatgtcctttttgttgatgttgatgctgttcctttctgtttgttagttttccttcgaacagtcaggttcctcagctgcaggtctgttggagtttgccggaggtccactccagaccctgtttgcctgggtatcaccagcggaggctgcagaatagcaaatattgcacaacagcaaatattgctgcctgatccttcctctggaagcttcgtctcaaaggggtgcctggctgtatgaggtgtcagttggcccctactgggaggtgtctcccagttaggctagatgggggttagggacccacttgagaaggcagcctgtccattcacagagctcaaacactatgctaggagagccactgctctcttcagtgctgtcagatggggatgtttaagtctgcagaaatttctgctgccttttattcagctatgccctgcccctacagatggagtctacagaggcaggcaggcctcattgagctgcggtgggctcctcccagttcgagcttccagaccactttgtttacctactgaagcctcagaaatggtgaacacccctcccccacccagtctgccgccttgcagttccatctcagactgctgtgctagcagtgagcgaggctccatgggcgtgggacccactgagccaggcacaggatataatctcctggtgtgccatttgctaagaccattggaaaagcacagtattaaggtgggagtgtcccaattttcccagtacagtctgtcacgggttccctcatctaggaaaggtaaatcccctaaccccttgtgcttcccggtgacgcaatgccccaccctgcttcagctagccctccatgggctgcatccactgtccaaccagcccaatgagatgaacaaggtacctcagttggaaatgcagaaatcacccatcttctgtgtggatcaggctgggagctgcagaccggagttgctcctattcggccatcttggaatggcaatctatgtttgctttttacatttgaaaaaactggtgtcacgtacctaggtattaatcattgtggtatcctcttgccgatttacctctttatcattaactagtgaccctccttgtcttttgttgttacagtctgtgattttagtctattttatctaatatgagaatagctactctggcacttttttggtttccagcttcatgaaatatccttttccatttccctgttttcatttccctttcggtgtctctatagatgaagttgatttctttaaggcaccataagttgggtcttatttctttatccatttgaccatttagagaatttagaacactgtcagtgttattattcataagtaaaaacttaagagtgggtgtagtggtgtacatctgtatttcctgcactttgagagactgaggcgagctgatctcctggggtcaggagtttgagaccggcctggtcaacatgatgaaaccctgtctctactaaaaatacaaaaattagccaagcatgctggcatgtgcctgtaatccaatttacttgggaggctgaggcaggagaagcttgaacctgggagacaaatgttgcagtgagctgagatcacacagagaagtcatctccactctcctcatcagaacctcttgttcacagcatttgtgagcacaaatcaatgatggttattctttcctactaattagggatattttattacacagcaatagcctccagcaaagggaaccatcatacatgattcctacaagttgacagggctggaattatcactgaaaaactaaggtggctatacttgattcccaatgtccaatttttcatgaatagagaaatttatcctttttccccccagccagaaaccaagttttgctcttacgcccaggctggaatcaagtggcacaatctcagctcactgcaacctctgccccccagcttcaagaaattcaccttttgaacaaggagatattaaggatacactatgtgtatgctaccggtggttgcaggagactcagaaaagagagaaacagtcactggcctcgtgcaactgatattctcgggaggagagaaaggcaatcaagaaagaaacatgctgtatttcagacagctgtaagtcctccacaagaaaagaaagcaggtgaggaacataggaaatgtgtcaaccataaggttcccgctaattctataagttggtcagggatatcctccaagaataagcagcatctgagcaatcacctgaagggaggaaggaaggaagactgtgagtggtggcttacacctgtaatcccagcactttgggaggccaaggagggcagattgcctgagctcaggagttcacgaccactcagagcaacctgttgatacccaatctctactaaaaacacacaaaaaaattacccgggtgtggtggcacgcacctgtagtcccagcttccatgcccagctgatttctctctctccatatatatatatatatacacatatattgtttttgcagagatagggtctcactgtgtcacccagtcatcaagcaattctcttatactgttttggaaaagcatgggaattacaggtgtgaaataccctgctggtcctgaaaaatgtgatatttgggattctctgcctggcttgttttacccaaaataatgacctccagttccttccaggttgctgcaaaagacatgattttcactgttttataactgaatagtattcctgtatgtatacataccacattttctttatttattcttctgttgattgacatgtagggtgattccatgtctttgctactgtaaataatgctgcagcaaatatttgtgtgcattttgatctattcctttgagtaggtacccagtactgcaactgcaggactgagtagttgttatattttttgttctttcagaaatctccatagtgtttgccataaaatctgcactaatttacattcccaacaacaatgcataagatttccccttttctccacattctcactaacatttgttatgtttttgtctttttcataatacccattctgactggagtaagatatctcattgtggtggttgttgatatttttgagacggggtctcactctgttgccagactggagtgcagtggtgtgatcgtggcttgctgcaacctccacctcccgggttcaagcaattctcctgcctcagcctcccgagtagctgggactacaggcgcgtgccaacaggcctggctcattttttgtatttttagtaaagacagggtttcaccatgttggccaggatgatcacagtctcttgagctcatcatacacctgcctcagcctcccaaagtgttggaattacagtcatgaggcagcgcacccaacctcaatgtggttttaatgaccatttctctgacgattcatggtgtggagaatttctttgaaataccttttggccatttatatgtgctcttttaaaaactgactcctgtccaggtgcggttgagcatgcctgtaaccccagaacttcgggaggctgaggccaatggatcacttgaggcaaagaggcagaaatcagcctggccaacaaggcaaaaccccatctttactaaaaatacaaaaaatcagccacgggctgtgactcgtgcctgtggtgcaagttactcaggaggttaaggcacaggaattgcttgaacccggtaggcacaggtcacagtgagccaagatcatggcactgcactacagcatgggtaatagagaaagacctgtctcataaaaacaaatgaataaataaataagataaaaaataaaaaagtctctttatgtcctttgccgactttttaatgggattctttggagttttctgttgtagttgagatctttgtttactctcggtattagtcttttgtcaaaggaaaagtttacaaataatttcttccgttctgcagtttgtctgctcactctgttgagaggattatttctttggctgtgcagcagctttttgtttcagtaaagcttttgaatttatataattaaaattttcagtttggtttaaatttgcactggtcgatttttggttttgttgcctgtacttttgaagtcatactcttgaactctttactagacaataaccagaagagttttctctagttttcttctcacatttttattatttcagtacatatatttaagtctataattcatcttcaattgatttttgtagaaatagtgagaaataggagtccaggtttattcttctgcaaatgacaattcaattgttccagcaccaattattgaaaagggtgtgctttcctcaacgtatattcttatcagctttgtcaaagatcagttggctataaatgtgtggctttctttctgggctctctagtctgttacatcaatctgtgtgtctatctgtatactactaccatgctgtattggtgatgatggctttgtaatataatttgaagtcaagaaatgtgatgctcccagctttgtttatttgcttcagaaaggctgagtcaacagctgcagagatgaagctgcccctcctcgcagggctccttcccggaaaaagatcatggctcccactgaccatataaccatggctggaactcctgaaattcccaaagggaggccctacccagtgaggggggatgaatgaaggtcctacttaaggaatctgtctggccacaatcaggcacagcagctgtgctgccttgtgggggaccagaccacctggattccctggagcctgcaggctagaatgtctgagtccatggaaacacagaaatggaggccgccctcacctccccagaaaactgtagtctcaggcagtctccagccgattgccactggttggctgctattccaagccagtgggtcttaacttgagaggtgctgtggaagtggggcccacggaatgaggctgcttggctccctggattcagccccttttctaagggaatgtacagatggaactcccgccttgcccagctttccaagtatataaaactcctgagtctctgtgagtgtctgagcgagtgctctggcaacattcgacacggctctgtgtatctgacccaagacccttatggcatgagctaatgggaggatcttctgatccatgcgtggcaaagatgcatgggagaaacatggtttgtgggtaggggttgtgcattcactactgcttctcttggctgtaggtgaaggtttctttggctctgtgctgatactgggtgcaccatcacccaccccctttgtttcttctcctgggtcaagtcatttgcctaatcagtcccaatgtaggaacctggatacttcagttcaaggtgctgaattcaccgtgcttttcattcaggggaagacagctgcttctcattgggcatcttggcctgcccacttcacgtcactttttgtaaaatccacaccactccaggaatatccattacttaacttcgcctgaaataaacagaaggctcattacacttatcatgggctcacttacttcgcctataatgaaggtgccatggaaatgctagtggatgacgtggtccattttcttagggatgagatagaaaaatggtgtatggctttttaatttaattaaaatttttagtttggtttaaatttacattggtctctttttggttttgttgcctgtacttttgaagtcttactcgtgaactctttactggacaatgaccagaagagttttccctaagtttcttctgatattttgaccatttcagtacatacatttcagtctataattcactttaaattgatttttgtaaacatggtaagaaataggagttcagatttattcttccgcatatgataatgcaactgtcccagtaccaattattgaaaagggtgtgctttccctagtgtatattcttgtcagctttgtcaaagatcagttgcctatgaatgtgtggctttcattttggattctctcgtctgttacatcaatctgtgtgtccacatttatacctgtaccatgctgtattggtgactatggctgtgtaatatattttagagttaggaaatgtgatgctcccagctttgttcatttgcttcagctgaaaaggttgagtccacaattacaaagatggcagccgcccatccccggaggacctccaacccagaaagagatcaggcttcccaccaaccctataaccctggctggagttcctgaaattccaacagggaggaccttcccagtgaggagggatgaatcaaggtcaaatttaaagaaacagtctggccactatcaggcacagcagcagtgctgccttgtgggggacccctcctgctccagaccagctgccctccctggagcccgaaggctagattgtctgagtctacggaaacagagacggtggccgccccaaccacccagaactcggtagtctcaggcacttggcttgctatcttgccactgcttggctggtattccaagcccgtgggacttgagaagtgctgtgatgatggggaccacaggatgaggctgtctggctccctgtgatatggctgtgatgagtggaggaacaccagggctcatgtctcacacagaattggagaaaatgacacaaacacatgtacagtggttttatggcgtgcagtttaataggcaagaacgaaggaagagctccccatactgagacagagggaggggggctccaaagccaaaagaggaaacccggagtgctgtggataccaatgagttatatgaagaaactggagggggcggtgtctgatttgcatagggttcaggcgattggttcgaccaggcatgtcatttatgtggcccacggaaaaactggccctcccacctagcctttgaatatgcacgtgccggacaccctgatttcctacactcatggggatatatgggggtggccatatcgccaggcacaggtggggacaagggccagaagagggcgggaatcgctatgtttgggtggacccagtttctaatggccggcatctgcagatcaaggttaccggagaactctaaaagccggggctttcctgctagacaagactcatttctggagctgctttaaaaagaaacaaaacttcccaaggaccccttttcctccctgtctgcccaaaataatttcttaacaactcgtataacacctgaattcagcccccttactgggggaatgtaccaacggaactcccacctttcctggtttctcaaggctagattgtgtaaacctcctgggtctcggtctgtgtctgagcagctgctctgccaacactccacacagccctgtgtactaggcccaaggccgccgtgactcagcccatgggaggatctcctgatttcttggttgcaaagatccatgggagaaaaatggtttctggggcggggtcacacactcatggcttctcttggctgtgcaagaaggttcctttggctctgttccaatatagcgtggttcatcacccacccctgttttctttgttctcctgagtcaagttgtttgcctagtcagtcccaatgtgagaacctgaatatttcagttcacgtgcttatcgtgaaattcactgagactttaattcagtggaaggcagcctcttctaattggccatcttggcccgccccctccacgtcacctcccataaaatggccacgctctccagggacgatgccattatatatctttacgtgaaaccgacagaacacttattacactttttgtgagctcatttacttcacttataatgaacatggccatggaaatgctagtggagaaagtggtcgattttctgatggatgtgataaaaaaatggtttgccgaccaattaatgacatatgtctcaaaactagtaacgagacccttaatcgctgggttgaagtttctaatcaagaagatgctcatctatgtattcaacaaagcagcttcccttgcttctgaaatgcttccaaacaacatctcatatttcctgaagaagataatgcctggacaagcagcacaagtcattcaggtttactttcagctcataaatccagcaggatattcgcacaattgttgggaaaccttatcagttcatgagtcgtgcatgtttcctttaatttcaggaggaagagggtaatctggaagagtttcctgacctactctgctgctgtgattaaacaaccaccaggaaattttgatgacactgttctcctgagctcctccctttcctcggggaagaaaagcattgaaactacaaaaataaagtgttatttggctggagtgaggtctcatgtctgcttatgcggtggctcgctgctcagaacagggtgagtctctgagttgtacgctgaggaggggaggctgtcaatctagaaaaaacccattgcatgggacacctccatggggtctggggggctgaggatgaggagctggactggatctagggaaggaggaggtttcagagggtgaaattctggcagtaaatcctgggggtgtttgaaaacttcctccctcagaaggagaagactcagggaggaataaggacaaaccatgggtcccttgaggggcatttactaacttaagaggactttatcgggaagcagagtgacaatggcctccttgaggactgaggcccctggataaatgaggcccagatccagatccagtccatgggagatgagaccttcaagggacatatttttgttgggacagaggaaaagtgcagctctgcagctgcagaggaagccttggcagtgtgaaagcgaccttggagggggccctgtgcgttctgaatgcttctgaggtccatcccctgtccccgcctctttttctggattttttgggctccatggtctccgccatcttctgagcgctccacgctgccaccttcagttttctcttctgggctccaaatactccaaaatctttcatatctgtgcccctacccctgtttttagcatgtgttgggactccaggtccctgaaggtttctggcctgaaatccacctccccagcggtgtggattctgctctagagaccccgcacttggcaaggttcccaggcccctgggggacaaccgagtggtatgtgcacttcagggctccacactcggcaaggtctttcaagcccttggggttccctcctcagttttcttcacatgtctgggatgtagtcactctataaatgccgggatgtgatccccaccccagtgattttttttagttccatgagtgttgctatctgaatagtcatcctgagagtgatgggaccttttgaatttgcagcaagttttagattagtgtgagtggcctgagatcgcaaaactggggctagcattggatgtgaggttaggctggtggaaaaatttgcccagaacctgaggagtgtgggctcactgcaggtggttaggatcagcacagaattgcaaggatgtatagctttggggtaaagaataacatggttcagaagtacatgtattagtcttttcatgcattgctataaagaattacctgagactgggtaattaattataaaaactcaggtttaattggctcatggttccacaggctgtacaaaaaggatgatgctggccatcagctcaacttctggggaggcgtcagaaaacttagagtcatggcaaaaagcacaagggaatcaggctcatcctccatggccagagctggagctagtggtaggagaggtgctgcacacttttgaacaatcagatctttttagaactctatcaccagacagcacctagaggatggtgctaaattattcatgaaatatccacccatatgatccactcaattctcaccggcccaaccaggaccacctccaccattggggattacaattacacatgagatgtgggtggggacacagatccaaactcgatcagtgggcatcttggactgggtctactatagaagaagaaccaggagctgactatcatccttaagactgcccatgatggccaggcagggtggctcatgcctgtaatcccagcactttgggaagccaaggtgggtgaatcccctgaggtcaggagtttgagaccagcctcgccaacatggtgaaaccctgcctctactaaaaacacaaaaaattagatgggtgttgtgccagacgcctgtaatcacagctactccagaggctgaggcatgagaattgcttgaacctgggaggcggaggtggcggtgagccccaatcgcactgctacactccagcatgggcaacaataccaaaacatcgtctcaaaaaaaaaaaaaaaaaaaaaaaaggctgcccatgaccactgccccagtgagagggacaccagcatggctaagatcaagtgctggacattcttcatgggtcagacattaaagcaggccacactgttacagagatgggctccattcatagcaacaaagtggtgagaagatgtgggaatggcagaggccagcactttgccatcaatgcaaggtgggcataaggagctggcaccagtgccagagtgcatcaggggaggactgctttgcaatatctagcacttacctcttagagtatgtttcattagggacaacagatataaatggcagacaagtgagtcccttcagtaacaggaaatagaaatcatcaagaggaacagaaacagatgtcagcagccctcatataaagtcatcatccttcatccagttaaaacctgagacagttctcacataagaaggtctaattcaaaaagagactgggttctcatgaggcaggttcatgcaaaaccaagggaagtatacaactttgggattctccagcttcccttggaaaagacctacaatcatttgcttaggtaactgagcactgaacaaaggtgagtattgttatctttcagaagctgttggccatgaaggtcttgctggcataaaacccatggttggaaacatcaccatgacccctgttagagtaatggcctaagggcaagggtcaggaaattgatgtattccttgccaacttctgcgagacgagtgttggtccactcatctctttcacggaattcaccagtctggtatcttcaaaatccagaaggatgatggcagatggcaggaaactaatgcaaacaccatcagttgtacctccactgtagcagcagtaatggatgttatctcttcattgtaatatccagggagggagaagatgacattattctcaatattctaaacaccctgtgtgtacagcctctgtgatattttttgtaatatccgtgtgggagagaattatattactcctaatatctcaggggttgtgccccctctgtgacaatgttcctaacacccaggaggggataggatgatatcacttttagcatcacagggggtgtacaccccactgtaatattgttcataatatccgggggggagagaatgatattactcccaatatcgcaaagactgtacaccaacctgtgatattatttgtaatatccataagaggaagaataatattactcccaatgtcacaggaagtgtacacccttctgtgatattgttcaaaagatccagttagggaggggatgatattactctcaatatcttaaacaccctgtaggtaagccctctgtgatattcctcataatatccagagggagaggatgatattactcccaatattgcatgaagtctacaccccacctgtgatattgttcctaatatccaggatgggagaggatgatattactcccaatgtcgcaggggatgtacaccttccctgtaatattgttcgtaatatctagaaaaggagaggataatattactttcaacatcgcagggggtgtacaccttccttgttatattgttgctaatatccagggaaaaagaagatgacattaccaccactattgcagaaggtgtacacccccccttgatatagttcctaatatccagaaaaggagaggagatattactccaaatattgcaagaggtgtacattcccctgtaatatttttcctaacattcaggaagaaagagagtgatattgcccttaatattgaagggagtgtgccccccccgtgatattgtttctaatatccaagaaatgaaaggatgatattactcccaatatcacaggggctgtacagccccctcccatgatattgttcccaacatcggggggggggtgaaatagtattattcccagtatcacaataggtgtacacacctgtcgtgatattgttcctaatacccatgggggaaaggacgatattattcttaatatctcagagggatgtacaccctccctgtgatattgttcctaatatccggggtgggagaggatgatattacccccaaaatctcaaagggtgtacacccctcttgtgatattgttcctaatatccagggtggagaggataatattattcccaatatccaggaaaggaaacgatgatgttactgtgaatattccagggggtgtcctcccctctgtgatattgttcctaatatccaggttggggagattatgatatttctccaaatatcacaaggggtgtacaccaaccctgtgttattgttcctaatatcgatggggggagaggacgatattactcccaatatcacagggggtgtacaccacctttatgatattgttcctaatatccatgaagaaagaggatgatattactttcaatatcgcaggggatgtacactccccctgtgatattgttagtaatacctaggagaagaaagtgtgatattactcccaatatcgcaggggatgtacacgcttcctgtgatattgttcctaatatttagggggaaaggggatgatattactcccaatatcgaatggtgtgtacacccccccgtgattctttttttttttttttttttttttttgagatggagtcttgctctgccgcccagactggcgtgcaatggcgcaatctcggctcactgcaacatttgcctcccaggttcgcacgattctcctgcctcagccttcggagtagctgggattataggcagctgtcaccataccaggctaatttttgtatttttagtagagttggggtttcaccatgttggtcaggctggtcttgaattcctgacctcaaataatccacccaccttggcctcccaaagtcctgggattacaggcataactttccctgtgatattcttcctaatattcaggaagaaagaggatgatattgctcccaatatcgcagagagtgtgcactcctcctgtgatatggttcttaatattcagaggaggagaggatgatattactttctatattgcagaaggtgtacacctccctcgtgatgtctttcctaatatccagtgggggagaggttattagtctcaaaatcacagaaggtgtaaacccccatttgatattgttcctaatattcaggggtggggagagaaaggtattactcctagtatttcagggcatgaacacccccaccgtgatatcattcctaatatccagaaggggaggcaatgatatttctcctaatatcacaaagggtgtacaccccttctgtgatattgtaaatattctgtgtgtacacccccctgtgttatagtctgtaatatccgggtgggggagagggtgatatttctccccatattgtaggggatgtacacccttctgtgatatggttcgttatatccagggaagaaaaaggtaatattgctgcccatattgtggagagtgtacacccccatgtaatatggttcgtaatatccaggagtggagagggtgatactgctccttacatcgaggaaggtgtacaccttattgttatatgattcgcaatatccaggggaggagagagtgatattgctccccatgtcgcagggggtgtaaaccctccgtgatatgattggtaatatccaggaaaggaaagggtgatatttctccccatatcgcgggggacgtacatcctcctgtgatatggttcgtaatatccaggaggaaagaggaaaatattgctcttcataacccgaggggtgtacaacccctgtgatatggttcgtaatacccagaagtgtacacccctctgtgatatggtttgtaatatccagggggttagagggtgatattgctccccatatcgcagtgggggtacacccccctggattggttcataatattcatggggggagaaatttacatttatcctcatatcagggggggtgtacaccccccgtgatatggttcgtaatatccaggggaagaaagggtgatattgctccttatatcgcggaaggatcaccctcccctgtgatatggttcataatacccagacgggaagagggtgatattgttcttcataaagcgaagggtgtacagccccctgtgatatggttcataatatgcaaaaggggagagggtgatattgctccccatatcacggagggtgtactcccttctttgatatggttcgtaatatccaggggtgtagatggtgatatagctcgccctattggggagggtgttcacccctctgtgatattgttcgtaatgtccagggaaagagaggatgatattactcccaatatcgcagaaggtttacaccactctgtgatattgttcataatatccagggaaggagaagacgatattactcccaatatggcagggggtgtagaactcctgtgatattgtttgtaatatccaggcaaggagaggatattactctcaatatcgcagaaggtttacacccctatgtgatactgttcatgatatccagggaaaaagaggatattactccctatatcacaaagggtgtacacccctttgtgatattttttgtaatatccaggggagagaggataatattactctcaatatcagaaggggtgaaaaccctcctgtgtcattgttcataatatttagggaaggagagagtgatattactccaaatatcacagtgggtgtacacccccctatgatattgttcctaatttccagaaggggagatatgatattattgccaatatcgcagaaggtgtacaccttactctgacattgtttgtaatatccagatggggaaatgatgatattactcctaatatcacagggggtgtacacccccttgttttattgtttgtaatattcaggggaagagacgattatattactcccaatatcgcagggtgtgtacaacactctatgatattgttcataatatccaggggaggagaggaagtgtacacccccccgtgatattgttcgtaatatccagaggtagagaggatgatattactcccaatattgcaggtggtgtacacctttctgtgatattgtcatgatattaagaaggggagaggatgatattactaacaatatcacaaaaactgtacactccctgtgatattgttcataatatccagaagaagggaggatgatattattctgaatctcgcagaagatatacaccaccctgtgatatggttcataatatcctaggggaaagaggatgacataactgtcaatatcgcagggggtgtacaattccctgtgatattgttcacaatattcagagggaaaaaggataatattactttcaatatcgcaggcggtgtacacattactgtgttattgtttataatatccggaatgagagaaaattttctcccaatatcacaggaggtgtacactcccctgtgatattgttcgtaatatccagggaggggagaggatactattactcccaacatctcagggagtgtaggccccccctttgatattgttcctaatattcggaagtggagaagatgatattacttccaaaatcgcagggggtgtacactccctctgtaatattgtttctaatattcatgagtggaaagaaagatattactcccagtattgcaggggacatacaccacactgtgatcttgttcacaatattcgggggggagaggatgatattactcccaatatcaaagtaggtgtacacccccttctgatattgatcgtaatatccagaattaaagatgataacgttactcccaatattgcagggggtgtacatttttgaatactgttcataatattaagagggggaggggatgatatctgtcccaatatcgcaaagtgtgtacacctcctgtgacattgtcccaaatatccagaggaaaaaaggatgttattactcttaatatctcagagagtgtacacctccctgtgatattgtttgtaacatccagaagaaagaggctgatattactcttaatatcgcagggggtgtacacccccgccccgggatattattcgtaatatccagggggaagtggaatgttcagaatgggagaggatgatattacttgcaatatcatagtgggtgtacaccccactgtgatattgtttgtaatatccgggaaaggagaaaatgacattcctccccatatggcaggggctgtacaccacctatcatattgttcaaaatatccagaaggggagaggatatgtctccaagtatcacagggggtgtacaccccgctgtaatattcttcctaatatccagggtgtgagaggataatagtactcccaatatcccagggcatgtacaccccccttgtgatgttgttcctaaaattcatggggagaaagaatattactcccaatatcacagggggtgtacatacactctgtaatattgttgccaatatgcagcaggagagaggatgatattactcccaatatcacaggggctgtacaccccgctgggatattgtttctaatatcaagggggaaaaaggatgatattactcccaatgtcgcagggtgtgtacttcctctttgtgacattgttcctaatatccaggagagaagagggtgacattccttccaaaactgaaaggggtgtacacaccctttgagatattgtctttaatatccagaacgaaacaggatgatataactcctaatactgcaggggggtacaccctctctgtgatactgtttctaatatccaggaggggaaagaaaaatattaatcccaatatcacagggggtgtacattccccctttaatattgttcctaatatccaggaagacacaggatgatactatttccagcagcacagggcatgtacacccctttgtgatattgttcctaatatccaggaaaagagaggatgatattactgtcaatattgcagggcgtatacactggttctgtgatattgtttctaatatccgggggtggagaaaatgatattactcccaatattccagcgggtgtacacccgttctatgatattgttcctaatatctgggggagagagaatgatattattgtcaatatcacaggggatgtacagattccctgtgatattgtttctaatattcacagggggagaagggtataatactcccgatatcgcagggggtgtacactccccctgtgaagttgttcctaatatccagggattgagagaatgatattactcccaatatcacaggcggtgtaaaccccctgtgtgatattgttcctaacatccagaggaaaagatgatgatattattttcaatatcacagggggtgtacgcatccctgtgatattgtttctaatatccaggggaggagaggatgatattattgttaatatcgcagggggtgtaccccaccctgtgatactgttcctaatatccggggtggaagaggataatattgctcccaatatcgcaaagggtgtacaaccttcctgagatattggtcctaatatccagggagggagaggatgatattactttcaatatcacagggagtttacacaacccctgcgatattgttcctaatatccagcggaagaagagttaggataatactattttcaaaattgctgggtctgtaccccctccccgtgatattgtttctaatatccaggaggggagaaagtaatatgactcccaatatcttagaagatgtacaccctccccataatattatttcttacatccagggggtagaggatgattttgctttcaatatcacagagggagtaaacctttccggtgatattgtttttaatatttaaaaagagagaagataaaattactcccaatacaaaggggatgtattgtgtactcccccctctgatattcttttttaatatccagatggagagaggatgatattactttcaatattgcatgggatgtataaatcccctgtgttattgttctgaatatacaggtggggagagtatgatattactccaaatatcgcagggggttctttccccctgtgatattgttcctaacattcagggagggagaggatgatattactcttaatattgcagggggtgtacccacgcctatgatattgttcctaatatccagagggggagaggatgatctaactcagaatatgacaaggggtgtacacacagcctgtgatatggttcctaatatacaggggagaaggggataatatttctcccaatatcgcagggggtgtacaaccccctgtgatactgttcctaatatacagaaggggacagcatgatattgttcctaatatcgcaggaggtgtacaacgccctgtgatattgttcctaatatccagggcgggagaggatgatattaccctcaatatcgcagggggtgtgcactttccctgttatattgttcctatgatccgggtggggggaaatgacattagtcccaatatcgcaggatgtgtgcaccgctcccccgtgatattgttcctaatatcaagggggagagaggaggatattactcccaatatcgcaagggatgtacatcctccatgcgatattgttcgtaatattcaggaggagagaggatgatattactcttaatatcgcagaaagtggacacccaccctgtgatgttcttcataatatccagggaagcagacgattatatgactttcaatatcgctgggagtgtacatcccttttgggatattgtttctaatatccaggaagggagaggattatattactctcagtattgcaggcagtgtacaccttttttgtgatattgttcctaatattcagaaagggaaaggatgatattactcccaatattgcaggtggtgtatatccccctctgatattgttccttatatcaaggaagagaaagaataatattactcccaatatcaaagacagtgtagacccctcctgtgatattgtatttaatatccatggggaaagaggatgatgttactcccaatatcgcagggggtttacacccacactgtgatattattcctaaaatccagtggaggagaaaataatattgctcccaatattgcagggtgtatacaggccctcccccgttatattgctcctaatatccagcggtggagaggatattactttcaatttgtgtagggagtgtatacccccctgtgatatttttctaatatcaaggatgggaaaggatgacattactcccaatatcgcaggaggtgtacacgccctgtgatattgttcctaatatctagggaaggagaggatgatattactttcaatattgcaggagctgtacaccctctgtggtattgttcttaatatttaggttgggagaaaatgatatgagtccaaatatcgcagaaggcatacacacttccaataacattgttcttaatatccgggggagagggtgatattactcccaaaatctctggggggtgtacacccccttctgatatttttcctaatatccagggaaggaaacgatgatattactataaatattccaaggagtgtacaccttcctaatatcctaatattgttcctaatatccaggggtgggagaggattatattactcccgatatcgcagtgggtgtacacccctcctgtgatattgtttctaatatccaagctaggagaaaatgatatcactctcaataccacagggggtgtacaccttccgcatcatattgttcctaatattcagagggaaagaagatgaagttactttcaatatcggaggggttgtacacaacccctgtgatattgctgctagtatccaggaagaaaggggattatgttactccccttatagcagggggtatacacctcccctgtaatattgttcctaatatcaaggctgggatatacgtggggggaaggatgatattactcccaatatcgcaggggttatacaaccttctgtgatattgctcctagtaaccagggcagaagaagatgatattactcctaatatcgcaggaggtgtacactcccccattatgttgttcccaatatgcagaaaaggagaggatgacattattgccagtatcgcagggtgtgtacaccacccctgtaatattgttccaaatatttagggggagagaggatgatattactcccaacatcgcagggggtgtacacacatcccctgtaatatagttcttaaaatctaggggaaaaggggatcttatttctctaaatattgcagagggtgtacactccccggtgatattgttcctaatagccgggagggagataattaaattactttcaatatctcagagagtgtacatcgcccttgcgatattgttcctaatatccagagcaaaagagaatgatattactcccaatatcttaggagtgtacatttaacctgtaatattgttcctaatatccagggggaagagaatagtattactgccaatatcgtaggggttgtacaccttttctgtgatattgttgcaaatatttagtagagggaaagaatattactcgcaatatcacagggaatgtatacttcccctgtgatattgttctgatatccagaaaaagagagggtaatattactcccaatattgcagggggtgtacaccccccttgtgatattgatcctaatataaaggaaggaagaggatattactcctcatatagaaggggttgtccaccccccttgtgatattattcctaatattcagggaagcagaggatgatattattttcaatatcacagagggtgtgcagtccacctgtgatattgttcttaatattcggggggagaggatgttattatgcctgatatcgcagtagaggtacacccctcaagtgatactgttcctaataaccaggggtgaagaggatgatattactcccaatatcgcaggtggtgtacacccccccatgatggtttctaatatacagagggggagaggaaaatattactcccaaaatcgctggaggtctacaccccccttgtgatattgttcctaatatccaggaaaggaaacgatgatattactgtgaatattccagggggtgtacacccgctttgtaatattgttcctcatatccagggtgtggagaggattatattactcccagtatcgcagggggtgcacgacgcccctgtgatattgtttttcatatccaggaggggagattattatcaatatggcaaggggtgaacaccccctgtgatattgtacttaatagttaggttggcagaaaatgatattagtctcgatatcgcagggggtgtgcactccgcctggtgatattgcttttaatatcaagggggagaaaatggcattactcccaatatcgcagggggtgtacaccgctcatgtgatattgttcctaatatccaggtggagagaacataatattactcccaatatcgcacaaggtgtacacccctcctgtgatatggttcctaatatccatgggaggagatgatgatattactcccaatatcacaggggatgtacaccacccttgtgatattgttcctaatatccagggaagaaaacgatgatattattgtgaatattacagggagtgtacacactccctgtgatattgtttttgatatacagggtgggagaggatgatattactcccaatatcacataaggtgtacaccccccgtgatattgttctaaatatttcggtggggagaaaatgatattagtctccatatcacagggggtgtgtgctcctcaggtgatattgtttttaatatcaagagggggaggagattatattactttcattatcacagggggtgtacacccctcctgtgatattgttccttatatccaggcgaggggaaaataatattactctcaatatcgcaggaggtgtacacaccccatgtgatattgttcctaatattaagggggaaagaagataatattactttcaatatcacagggtttgtactcctttcttgtgatatagtttttagtatccagggggaaagagcatgatattactcccattgtagcaaggggtgtacacacctcctgtgatattgttcctaatatccagaagtggtgaggatgatattactcccaatatcgcagggggtatacaccccacctatgatattatttctaatatccatgggaaaagagtatgatattacacccaatgtcgcagagggtgtgtatttttcctgtgatattgtttctaatattcaggcggggagaagatgatattactctcaatatagcagaaattgtacatccccgctgtgatattcttcataataatcagggaaaaagaggatgatattactaccaatattgcaggggggttacacttcccctatggtagtgttcctaatatccaggaagaaagaggatgatattaatcccattatccaggaagtgtacacccaccctgtcatgttgttcctaatatccagcagggaagaggatgatattacaccccccccccgtgatattctccttaatatccaggaggggagaggctgatattactggatatatagcaggggtgttcataccttctgtgatattgttcctaatatccagaaaaggagaggatgatattacttccaatatcgcagaaggtgtacacctccctgtgatattgatcctgacattcagaaggggagaggatgatattactcaaaataccgcagggcatgtgcattcccttgtgatattgttcctaatacccagaagggaacaggataatattactttcaatatcgcagggagtgcacacccccctttggtatggttcttaatatccagaaggaaagagggtgctattactttccatattgcaaggggtgtacaccccactgtggtatggttcataatatccaggcagggagagggtgctattactccccacagtgcggggcatgtacaccctgctgcggtacggttcctaatatccagggggagagaggatgctatgactccctatatcgcggggtgtgtacacccctgtgtggtatgttttgtattctccaggaacggagagggtgttgttacccctcatatcgctggaaatgtacactcccctgtggtatggttcgtaatatccaggggattgagggtactgttacccccatactccccatatcgtggggggagtgcacctccctgtggtatggttcgaaatatccagggtaagagagggtgctattattccccattttgcaggaggcgtacacccccctatggtatggttcgtaatatccggggtgaggggatgctatcaaaagaagagagaaagagaccccccatattgttctatattattttatactcagtacctgttttaagaagaaacaaggaagtgaaaccaaaagcaggcagcccggcgccaggcaccagacccaaaaccagacccgaaaccaggcctgggcctgcctgaccttagcctgatagttaaaattcaacccatgacctagcaaccaatgttatccatagattccagacattgtatggaaggacattgtgaaatttcttgttctgtgctgtttcactctgattaccggtgcctgcagcccctgtcacatacccactagattgctcaatcaatcatggccctttcatgtaagatctttagtgttgtgagcccttaaaaaggacagaaattgtgcactcaacaagctcggattttgagacgctagtctttcgatgcttccagctgattaaaagccacttccttcactacctcggtgtctgtggggttttgtccgcgactcctcctgctacactatgactccccatatcaaggggggtgtacacccccctgtggttcgtaatatccagcaggggaaaaggtgctattactccccatattgcagggagtgtacacccccttgtagtatggatcgtaaaatcaaggggggagggaaggtgtaattatccccatatctcagggggtgtacacccctttgtggtaaagtttgtaatatccagggatattacagggatattatccccaaattaatacttttataatttcttatgcctgcctttactgcaatctctgaacataaattgtgaagatttcatggacatttatcacttccccaatcaatacttttataatttcctatgcctgtctttactttaatctcttaatctcatcatctttgtgagctgaggatgtatgtcgcctcaggaccctgtgatgattgcattaactccacaaattgtttataaaacatgtgtatttgaacaatatgaaatctgggcaccctgaaaaagaacaggataagagcgatgttcagcgaacaagggagataagcataaggtctgactgcctgtggggctgggcagaacagagtcacatttttcttattgcagaaaatgagtaggagaaatatcactgggaagggaacgcattcctaggggaggcctatggacggccgctctgggggtgtatcccttatgtggttgaagataagggatgaaatacaccctggtcccctgcagtgccctcaggcttgctaggattagaaattccagcctggcgaattctagtcagaccagttctctgctcttgaaccccgtttcctgttaagatgtttatcaatgacaatgcgtgcacagcaggacatggaacctcaatagtaattccattttctccctggccttgtgaccttgctaggcccttctgcccttgtgatcttttattgccatttgaagcatgtgatctctgtgacccactccctattcgtatccccctccccttttgaagtccctaataaaaacttgctggttttgcagatcaggtggtcatcacagaacctgccgatatgtgatgtcaccccggaggctcagctgtaaaatttctctttcgtactctttcactttatttctcagaccaggtgacacttaaggaaaatagaaaagaacctactttgaaatattgggggctagttcccccaatagacattgttcctaatatccagaaaaaaagaagatgatattactcccaatatcacaggggttgtgaaccccacctgtgatatggttcctaatatccaggaagggagagaatgatattactctccatattgcagggggtgtgcacatccctgtgatattgttcctaatatccaggggaggagagggtgatattactcccaatattgcaagggttgtaaactccaccctgtaatattgctcctaatatttaggatttagggggggagaggataatattactcccaatatcgcaggggatgtatatgccctctttgatattgttcctaatatccagggggggagaggataatattactttccatatcacaaagagtgttcacccccctgtgatattgttcctaatatccaaaaaggaagaggatgatatcaatcccaatatcacaggaagtgtacaccccccccttttatattgtttctaatatccaggggaaatgagggtgatatttctctcaatatagcagaatgggtacactccccctgggatattattcctaatatccaggggaaaaaaagaggttgatattcttcccagtatagcagggaatgaatacaccctttgtgatattgcttctaatatcaaggggaaaagaggatgatatgactcccaatatcacaggggatgtaaacctgtggcgttgttgctaatatcaaggagggaagagtatgatattactcctaatgtcgccgaaggtgcacactttccctgtgatattgttcctaatatccaaaagggaagagaatgatattacccccagtattgcagggtgtacaccacccctgtgatattgctcctaatacccaggaaaaaagagaatgctattacccccaatatctaaggggacgtataccttccctgtgatattgtttctaatatccaagtggggagaggatggttttactctcaatattgcagggagtgtacactccccctgtgatactgtttctaatactcgggctgggagaaatagtattactcccaatatcgcagtgatattgtttccctgtgatattgtttctaatatctagtgggggagataattatattactaccccatacacaggggagggtgtacattcccctgtgatattgtttgtaatatccagggaaggagaggatgttactcccaatatcacaggggttgtacaccccttttttgatattgttcctaatatctggggggcagagaattatattactgtcaatatcacagagtgtgtacaccccctctgttatattactctttatattcagggcggtagaggatgatattactccctatatcacagggggtgttcacccctcctgtgatattgtttataatatctaaggggaaagaggatgatatcactctcaatatcaaaggaaatgtacacctttcctgtgatattgtttttattatataggggggcagaggatgatattaagaacaataccacaggggatgtacacccacgtattgatattgtccctaatatgtatggggaaagaggacagtgtaactcccgatatcgcagagtgtgtacacccccttgtgatattgtttctgatatacacggggagaaaagataatatttcttccaaaattgcagggggtgtacaaccccctgtgatattgtttttaatatccagtgggggagagaatattactcccaatattgcagggcgtgtacacaacccctgtgatattgttcctaatatccagagtaggggaggatgacattactttcaatatcgcaaggggtgtacattcccctgtgatattgctcctaatatccatgaggggagaggatgatattattcctaatatggcaggggctgtacaccttccctgtgatattgtttctaacatccagtgggggagaaaatgatattactccctatatcacagaaggtgtacactttccctgtgatattgttcctaatatccagaaggggagaggataatattactcccaatatcgcaggaagcttacaactcccctgtgatattgtttctaatatccagggaggtagggatgatattactcccaatatcgcaggggatgtacactcccccgtgacattgtttctaataaccagggggtgagaggatgatattacgcttaataccgaagggggtgtacacacccttgtgatattgtgcctaatagccagggggaagaaaattatattaattttaatatttatggggaaaaaggatgatattactcccaatatcacaggggctgtacaccgaccttttgatattgtttttaatatccagaagagaagaggataatattgctcccaatatcagaaaaggtgtaaaccccttctgtgatattggtcctaatatccagggagggagagaataatattactaccaatatcacagaaggtgcccacccccaaggtgatattgctcctaatatccaaagataatagggtgatgttactcccaatatcacaggaggtgttcacaccccttgtgatattgtttctaacgtacagggaagggagaggatgatattattcccaatatcacaggaggtgtatactcctctgtgatattgattttaatattcggggggaaaggatgatattactccctatatcgcagagggtgtacaccctctgtaatattgatcctaatatccagggcgggataggatgatattactcccaatatcgcagaaagtctacacaacccccagtaatattgtttttactatccagggggaagaggatgacattactcccaatttcacagagtgtgtacactcaccatttgatattgtttctaatatctagggggagagaatatattactcccaatatcacaggaattgtacaccacctctgtgacattcttgtgaatatccggggaaaaagagaataatattactcccaatattgcagagcgtgtacacccctccatgatatcgatactaatatttttttaaagaggatgatattactcccattgtcacaggatgtgtacaccccccttgtgaaattgttcataatattctggggggagagcataatattactccccatatcgaaaaaggtgtccaccctccttataatatggttcctaatatccaggatattacttaatccaggatacttgtaataccctaaatatacaattgcttgaacctccacctcccaggttcaagcaattcttctgcctcagcctcccgagtagctgggactacaggggcacaccaccacacccagctaatttttttttcttgtatttttagtagagatggggttttgccatattggccaggctggtctcaaactcctgaccttgtgatctgcccacctcagcctcccaaagtgctgggattataggcgtgacccaccgtgccaagccaggaagaggatgctctatagatttccccaataagagatggctttgcagggccattccaaaatatgtcaaagaaatacatttggggataaaatactttgatttcctttagggaatgttatctattatgtgatgctataccagagtcaggttggagtcggttatcttattgcaacaaagagtctgttccgtcactgttgggatctctattttttcctcttatttcttgagacagggtctcactctgtcacccagtctggagtgcagtggtgcgatcttcattcactgaaacctctgcctcctgtgttcaggtgattctcgtgcctcagccccttaagtaactaggattacaggtgtgcgccaccacacccagctaatttttgtattttcagtagagatggtattttgccctgttggccaggctggtcttgaactcctggcctcgtgtcatctgcccacctcgacctcccaaagtgctgggactgcaaatgtgagctattgtgcccagccaggatctctgttttaatgttagtgctggtcactttgcatgaactccaaagggaagaaatataatgaggtgtgtctgaccccctgccttctcatcgtgacctgaattagtttttcaggtttgcaggggatacccttggacaagaaggggctctattcggttggttggggggattagaattttactttttgtttacaatatttctcctgaaagagttaggggctcacaaggaatttccgcgtgagcaacttatgaggaaagccatctgggaagatatgtgtccttgtgtcactgggatattctcgtttaccccaatgatacggcaatgacgcagggttgtgaaattacagctatgtgtttggggaaaaaagaaagcaggattgtgtgactacgtttccaaacttcacttgcccttagccatagtgagttgggggcctggagattctgttttctttcacaatgatatagatacaattaaatgtatagaaagcaaaaaaataaaaaggtgagtaatgaggaacctctgattcctgagtggccatgtagttacccatggcacagagccacagttactgaaggtaaagtttgctggggaatttagaaatgaatccagctcttggaggagtcagtttactggatgcctaagaaaatgcaaacaaaataagaaaaaagggtaatattcaatcccatagttattgttacctgtcatagctaaagtaaaattaaaacagagtgctggcttcaatcttgatgctacactaagcttagatttcagtgaatgtgagtctcagccactagctcagagccacctcccaaagaccaaatcatgtagggacaatagaaagtacttctgagaattgtggttaccaagaacctagtaactgttggggaggagcaaaacaaagtacagaaaccagagggtacaatctgagtgagactgctatcagcttctggaggagcctttactaaaatgaatgatgagagtaactggatgatgagagtaactaatggatgatgagagtaagcaatgtctttggttttcttttttttttttttttttttttagcagacgtctcactcttgtcgcccaggctggagtgtaatggcatgatctcgcctcactgcaacctccacctcctgggttcaagcaattctcctgtctcagcctcccgagtagctgggactacaggcactcatcaccacacctggctaatttttgtatttttagtattttctggtgagggtccaggtttccggaaacaactcagagacatatgttaagatgttatctttagttttcacagggaaccaaatatgttacgactccaatttccttggctattgttttaagttaccattaccttctcgttgatcaagttgctcatttacttctcaagcctagctagatgcctggaatttcccttgaaggaagtcaagattttcctttatctccatactggctgatggtgatcgagtaagcccctaagaggggtccctgctccatctcgagatgctgctagattctacagtgcctaataaacagctctcgcctggccgacaaagagctgcttgctctctggatagcaattccaaagtgaacagacaacatcctgtttggaagactgccactctgttagaagaagcatcaggaaaacctttcttttgagctatttataactaacagcaattgaccaagtatacttttgtgagtgaaactgacctttctccctgtaagaattctccaaaatttggaaactatttgtgagtatttttacttatggcaatataattattggcacaagctcaatcagattcggttttctttcgtaacaggaaccattggagatactcattactctttgaaggcttacagtggaatgaattcaaatacgacttatttgaggaattgaagttgactttatggagctgataagaatcttcttggagaaaaaaagactgggtatattttcaatatgctttccttttaaggtccctcacctgtggaaagtaaagaatgtcactttctgacaggctcaggaacctcaagttatgtagggatctcaagaagatgggggaattcacccagttcatacaggtgaaattgctgttgcaaagattatgaatatgagagaagtccagcatggctgacttcatctcgtgtctggcctcaggctggctgcccttgctcactcttgggcataggccaagctagccatgggaggaatttagtttatagtttaactttgaagcacggatgataatagtctctccctaaaatgaaccccttccttgctcagggactgaaactacctttgtatgacaaatgaaagcccacaagattaagattatgagaggggcctgaattctgctaaaatgcaggtgtagctgactgataacaagtcattgtcccacagcttgcctttctataatctcttgcttctcaggagtcacatggccagaggtcctgagatttccagtcctgtgacccccacccagagatggacttagtgcatgaggaccattttccacacccctatgatttcatcctcaaacaatcagcagcaaccattccctagccccctgccttccaaattatccataaaaatcctagcctctgagttattagggagattgattaataatcccagtcctaccccttgggttgctctgatttaattaaaccttctctactgcaataccacggactcagtaaattggttttgtctgtgcaatgggcaagaagaacatgttgcatggttatacaggtactacaagcacagtctgatggcaaattattggttttgcttcctgcccttgatgtttctaaacatctagtccaaaattacttgtgaaaggtccagcaaagccaattttaaaagaggctatatggccaatcactattctttctacacattattgcaaataatcaggccacggctgggcacggtggctcatgcctgcaatcccagcactttgggaggctgaggcaggatcacctgaaatcaggagttcaagaccagcctaggcaacatgataaaaccctgtctctactaaaaatacaaaattagccaggcatggtggcatgcacctgtaatcccagctacttgggagactgagggaggagaatcacttgaacctgggaggcagagattgcagtgagctgagatcacaccactgcactccagcctgggcaatagagtgagactttgtctcaaataataataataataatcagaccaagtataatgaaattaaaatttattttgcaaataaattggtcctactacaatttatccttcatagaaatgtggaaactgaagataaaaaaaattaggtttcagaagaaaactatactacacctgttattagattctagccctaaacattgtttttgaggtttttattatttacctgcaatttggtctaaattctgaattatttcctgactacaagtatccaaggaataaatgggttttctttttctttatgatagttttagttggcttctaatgcaacaacaatttttattgtaatcctgtgtgcattctattcctactattcaaattattaatgttatagatctttcattgtagtacttctgaattaaccaaaatcacagtattctgaagatgattctacaaagcctgctgtttctacaaaggctgctgatgatttctacaaagcctgctgtagtgttgctgtggcctctgcttaaaaaagtagaaaacacattgatgcagcatgttcaccccaacctccctgcctaaaggctcagggaccatcttggaagaggaaggcgcgtgagattgtaagagccgaattagggggatggagtgtggagaataaggacacttcatcttggatgctcacctgccaaattgacttctgatgaaagccagctccagaaatgtgcctacagttactactttcacctaaaccctgcccttagtcaaatccttctcttcttctaagcaatcaacttcaattccttgtataacccacagtataaaagggcttttataccattctatcctattgcatgtaagccttgggtctgggaggtaacagtgtgggattccaccatctcatctccctgccacccaaacatgcctgctcttctttaagcaatattaaatgtttgtacttcagaaatttgatttgtcagcctcttcttcagactctcagcttctttggcctttgggagtaaatttgcataggcctgctcaaaacaggatgttctgggggtttgggggtgttgttttgttttgttttttgttttgtttagagacagggtctcactctgtcacccaggttggagtgcagtggtgcaatcatggcacactgcagcctcaaactcctaggctcaagcaatccccccaccttggcctcccaaagttctgggattacaagcataagccaccatgcccagccctggacttttctttaaagacatttacacagtgtaggaattactgtgggtgcactgctcaggtccccttctccaggatgctcattcctacctcatagatgattttcctgcagagatttgacctcagctgaagggcagtcacctggtccaggtggttgctattcacctccttcctgagaacagccaacagccagggacacgctagcacagagatataagagcgaccaaggtgaggccccttctgtgctgcggtgcatgctccagagcctccctgggatcagacttaagagggtctccagccagatctggtcttcgctgctttcctcgagctccccagcgcactcctgcaatgcatcttttttttttttttttttttttttgagacggagtttcactcttgttgcccaggctggaatgcaatggcgcaatctcagctcaccacaacctctgcctcgcgggttcaagtgattctccttcctcagcctcccaagtacctgggattacaggcatgcaccaccacgcccagctaattttgtatttttagtagaaacgggtttctccatgttggtcaggctggtttcgaactcctgacctcagttgatcctcctgcctcagccttccaaagtgctgggattacaggtgtgagccactgtgcctggcccaatgcacctcttgaatcacctcctcatgctttgcttttagagaacatgatccccaacatgtgattccagcaaagattctagaaagccaaccgtgacaatcacttctgggtttagatgacccccccccaccacaagatggcagtgagcacctcatcacagaggtgctgatggtctgcagcaccgcgccaggccagaacgtgccttttacagaagaaaataacccagtagctgactaggatggtgaggagggctggtgagcactgcggtagtgagagggacactagcatcactgagatgcaagtgatggtcatttttcataggtcaaagctcaaagcaggggacagttacagggcagggcttcatagcaccagtgtgatgaaagtatctgggagtggctaaggccagcactatgccatgggaagcaaggtgggcctgaggaggaggcagcagcgtcagcctgcaacaagtgggggctgccctgcagagacctaagagtcatgttatagagcacagtgtctgtaaggccaagaagtgtggacagccaagtgtgtcaattactagacatactcaagaggagcaggaagggcagggcatggtggctcatgcctgtaatcccagctacttgggagactgaggaaggagaatcgcttgaacccgggaggtgaaaattgcaatgagccgagatttcgccactgcactccagcctgtgtgatgggagcgggactccatctcaaaacaaaaaaagaaaaaggaaaaagaaaaaaagaaaaacctaggtatacttctcaagcaaataaaaataatcaaaaccaatatcatgcccgggcacaaatttcatatatataacagatttaaatatatgagggtgattatcctctcatatctccatttttttttgtttttccatttttttctttactaaaaaaagttaatgccaatgacacacaatttttttttttttttttttttttgagatggagtctcacttcttcgccctggctggagtgcaatggcgtgatctcgactcactgcaaagtctgcctcctgggttcaagcaattctcctgcctcagcctcccaagtagctgggaccacaggagtgagccaccacacccagctaatttttgtatttttaatagagacggggtttcaccatattggccaggctggtctcaaactcctgatctcaaataatctgcccgcctcggcctcccaagattctgggattataggcgttgagccactgcgccccgcctatgtatgattttttttttaattttattttcataagtttttggggaacaggtggtattttgttacatgagtaatttctttagttgtgatttgtgagattttggttcacccatcaactgagaagtatacactgaacccaatttgtggtcttttatccctcacccccttcccaccctttcccccggagtccctgaagtccattgtatcattcttatgcctttgcatcttcatagcttagctcttgaacccttactttctgtttgagggagaagacatatcatctacaagtagatactgtgtaaacattccattgcatgactatcccataacttatttattatttgtgtttggttatttgctgctatgtaacaaccccactcccaactaaatggtgtgacaattccatgattctgtggatcaaaaattctgaaaagtcaaacccaaggagttttgtctctgctccatgatgctaaagcctccgcaggggtgaggcgaatggctcagggtgactgaaaagctcagggttggaacagctggggatgaggcctctatgtataagatgattcttcactcacaggtctgaaactatggtggggacagccagaaggctcggctcagctgggacagtcacctgagccctacacatgacctctccaacatggtgatcctgaagcagttgggtttcttacacagcatcacacttttcttttttttttttttttttgagatgaaatattgctctatcacccaggctggagtgcagtggcacgatctcagctcactgcagcctccgcctaccaggttcaagcgattctcctgctccagcctcccaagttgctgggattgcaggcgcctgccaccaagcccagctaatttttgtatttttagtagagacggggtttcaccttgttggccaggctagtcttgacctcttgacctcaggcgatccgcctgcctcggcctcccaaagtgctgggattacaggcatgagccaccgcgcccggccaaagctcacacttcttatgattcagccttagatgtcacatcagttcattttccccacacttattagtgttagaagtcacaagcccacccatactcaggggactggcacacagaccccactctcaatggaaggggtgggacaccaccattcctgctgatgggcatttgggtaacttcctgtttgaagctattaagattgggctgctgtggccgggcgcagtggctcacgcctctaatcccagcactttgggaggccgaggcgggcggatcacgaagtcaggagatcgagaccatcctggctaacacggtgaaaccccgtctttactaaaaataccaaaaaaaaaaaaaattagctgggcatggtagcgggcgcctgtagtcccagctactcgggaggctgaggcaggagaacggcgtgaacccgggaggcggagcttgcagtgagccgagattgtgccactgcactccagcctaggcgacagagcaagactccgtctccaaaaaaaaaaaaaaagattgggctgctgtgactattctagtaggtgtctttggtgagcgcctacacgtgtttctctttttctctttagtatatgcccaggaggggaactgctggctcccagataccgtatgttcagggtcacacacacttccacagggttttccaaagcccttgtaccagcacgcactcccagcacctgtgtgactgctccagctgtcccacagtctcatcagttctattgctgatattttcattttagcttaagttatatttaataggaaaattaccgttgcctctgccccccgttcctgcctgtaggagtttctcgtagctgttgctacaggtggccacaaatctgtcacttaaacccacacaaattgatgtccttatggctttggagtcagaagtgtcaactgaaggtactagcagggctgtactgacctggtggcctcagggagcatctgtgctgcttctccaccttctagaggctgctgcatccctcgctccagccccttcctgacaccactcaccctcctacttctgttatcacatcctcaccttctctgtgttcagggctccctctgtctctctcttgcaagcacacttgggattccattgagggccacccacataacccaggagaatttctccacctcaatatccttaacaactgcagagcccttttgccataaaagttaccattcacgggttccagggattgtgacatgggtagctttaggagtgattattcctgcctgtctcccgctcaccagaacttggactttctctctcaacaggagccccctgtgtgggaatagcctgtctcaacgacgccctctataaggacctgcttcctcaaaggacctcatagtcgggtcctgcccctcagtgtccagtctgccttggctggaggggctgcaggggtgtgttggcgccacctggtggagacagggcatcacagcaggtgggagcccagtagaagcacaaccaaaacatgggtaatgtttaaaattttctggctaagcgctgtggctcacgcctgtaattccagcactttgggaggccgaggtgggtggatcacatgaggacgggagtttgagaccagcctggccaacatggtgaaacatcccctctactaaaaaatacagaaaaattagctggacatgtggcgcgctcctgtaatcccagctactcgagaggctgagacacgagaatcgcttcaaccccggaggggttgccgagatcgcgccactgcactccaggctgggcgatagagcgagactctgtctcaaaaaaaaaaaaagaagaggggaggcgaggggaggggaggggaaaagggggaatttgtttggagctgagacatccatcttctcctgacctcagatatttgcactcctggttatgaagccttcacacttggactgaatacaccaccagctttcccgatttccagcgtgcaaatggcagatcgtgagacttctcagcttccataattacatgagccaatttatatatataaattgggtcctccagaaaaacagaataaattatatatataattatacgcataacttaattaaattatacgtataacttagctatatatataatttattctgtttttctgaagaaccctactgacacaaatgttgagcatcttttcatgtgcttattggcttaataacttgtacatcttctttggggaaatgtctattcaagttctttgcccattttgtaactgaactattaatatttgtctttacattgttgagttgtaaaagttccttatatattctagatactagagccttatcagatatatttctgcaactattttctcctaatatataggttgtgtttttattttctttttctttttttttttattgagacagtctcactctgtcacccaggctggagtgcagtggcatgatcttggctcactgcagactcgacctgccaggctcaagcaattctcccacttcagcctcctgagtagctgaggttataggcacttgccatcgcacccagctaatttttgtattttttagtagagccgaggtttcgccatgttgcctaggttggtcttgaactccctgcctcaaagcgatctgtcagcctcagtctccctaagtgctggaagtacaggtgtgagccacagtgcccggccatctattttcaatagtgttttttgatgtacacaggtttggaattttgataatgttcaattcatccatttttttttttttttttttggttctttctactggaccaccactcttgagccctctaatccaacctccacgcggcagccagagggagctctctaaatgtaattactctttccctgctccacctgctcaaaacagtgtcacatttgtgatttaaaacagtatttctcaaacctaatttgcaaacaaagcaggtggaactcttcttgtatgcacagcatctgatttggttggtctggcatgggtctgggagtgagcacacctaccaagcggctgctggggtaacttgcgttttccactgatgatttcagcaatgtttccggtcccacatgctcctccagaaccttgtactcccccatgaaaaggtggagtccatttccccttcctttatttatttttttgagacgaagtttcactcttgttgcccaggctggagcgcaatggcgtgatctcagctcaccgcaacctccgcctcctgggttcaagcaatgcttctacctcagcctcccgagtagctgggattacaggtatgtgccaccacgcccagctaattttgtatttttagtagagacggggtttctccatgtcggccaggctggtctcaaactcccgacctcaggtgatccgcccgcctcagcctcccaaagtgctgggattacaggcgggagccaccgcgcccggctatttccccttcctttgaacctgatcaggacttgacgatggcatcaacatggtgagagtgaccctgcatggcttatgaggctgggttacacaaggcgatgttgcttctgactggctccctctcaggatacatgcccttggaacccatcctctaagctccttgggagcccaacttagcccatgtggagacaagacagggagagaaacagaggcacccccagccctcagccagcatcaaccgccagacaggagagcaaatgcgccaacaatgattccagctgaagcctcagacagcgtggagcagagatgagggatccctgcagattgcagatgcgtgagcaaaatgcatgctgtcactgttttgaaacaacaatgtctgggggctgtttgttatgcagcaatagacagctgtaacaatgctgttactgctgtattccatgaatgactgcactttgagtagcagggggctagatcactagataagccccatggcttctgtgtatgctatttttctacttttatatccttttcattcactttttttttttttttttttgagacagagtctcactctgttgcccaggtgggagtgcagtggtgcaatcttggcggactgcaacctccacttcccgggttcaagcaattattgtgcctcagcctcctgagtagctgcgactatagatgcacccccatgcctggctagtttccgtatttttagtagagacggggttttgccatgttggccaggctgatctcagactcctgacctcaggtgatccacccaccttggcctcccaaagtgctgggattacaggcgtgaaccactgcacccagcctcattcactttctttacttggctcatttttccttgttgcctcaattctcctctaagatcactttcctgacatttcagcctgggcctgttgccttctctgggtcccctccgcctcctgtgcctcccccatctcagccttgatccctcagattatacttcctctgtccccaccctgaccatcttggctgtccctggatagggatgggtatcttctcccactggtctgggagatctggaaggacaggcctggaaaagacttggtcactgctggaaggagctcagttagtgtggtgctgaggacagtacgggtgaggctggccccttcacccaaactcccactctcttccatagatttcacctctgtggcccaggccataggattagggcaactccccttaaacatcgagtccatcctccaagctgtccttttttttttttttttttttttttttgagacagagtctcgctctgttgcccaggctggagtgcagtggcgcgatctcggctcactgcaagctccacctccagggttcactccattctcctgcctcagcctcccgagtagctgggactacaggagcctgccaccacacccggctaattttttgtatttttagttgagacggggtttcaccgtgttagtcaggatggtctcgatctcctgacctcgtgatccgcccgcctcggcctcccaaagtgctgggattacaggcgtgagccatcgcgcccggcctcatgctgttcttgaatagtgagcacctgttacaagtcgccccaccagcctctcacttgtacccccctcatctctttctccccaagagacagaggaccctggcacttgtgaagcatgacccagaccctggggccatggcatccaacatcctcattccccatgacccctactgtctagatgtagctgccaagagacccccagactccccgggcctctgtctagagtgccaagacagagagagaatgccctgccgcttgcatgctttgtggggtgtccttcccccttccctggctgctaggcgtgacttcaacgttctccccaacccccaaacagcagcactgacaccagctgcagacctggctcaggttagctaatgaggaccaggctggggatggagcctgaacccctaaaccccagtcctgtaccccaccctaatcctggggtctccactggacaaaacgaagcagcttggtttttcgttgttattgtttttgagatagagtatctctctgtctcccaggttggagtgcagtggcgtgatctcagctcactgcagcctccgcctcccgggttcaagtgattcttgtgccgcagcctccccagtagctgggattacaggcgcgtgccaccacacccagctaatttttgtatttttagtagagacagggtttcaccatgttggccaggctggtctgaaactcctgacctcaagtgatttcccagcctcggcctcccaaagtggaagcggcttatttttaaggagaaaactcccgtggaaaggaatcagcacctcctctgtcaacatttcacttctctgaaaagactctcacttccaacagaaagtgctttgtaacacaacaatgaggctgggcgaggtggctcatgcctgtaatcccagcactttgggaagctgaggcgagtggatcacgaggtcagaagttcgagaccagcctgaccaatatggtgaaaccccgtctctactaaaaatacaaaaattagttccgtgtggtggcgtgagcctgtaatcccagctactcaggaggctgaggcaggagaatggcttgaacccaggagatggaggttgcaatgagccgagatcacgccactgcactccagcctgggcaacagagtgagactccgtctcaaaaaaaaaaaaaaaagaatgagaacatatggacacagggaggggaacaatacacacaaacaaaatttagaaacaggtgaaaataattttagtaatatttttactaatactgatatgctcaaaatattattatttcaataagtaatctaaaaattattgagatgtcttatgttcttttcatcatactaagcctttaatatttggtgtgtattttacactcacagcacatctcaatttgcagtccccatgtttcaagcactaaataaccatgtgtgtccggtggctaccatactggacagcgttgatctgaaatcgcatctgtatgcatcaccagcatatttgcagagatccccatctcagcagcacacctgaggctcatctgcgaaagcacctgcaacttctctacaacctcccacatcacctccaaacacatcctcatgtcatctgcaaacacacccatagctcacaggccaatgcctaaatatcattgcaggcaccttcagagaaagcacttactaaaggggtatacttgattccacatctgctttgacctgcaaatctcccttctcctttacatacatttgcatctcatttgtatgtcaatctaaatccactggcagagcctcagatcatcatctcaaagtcaggtggatgtggggctgggcaggcctccaggtgttcctcctcctgcttcctctggggctcttgatcctcctcctcttccttgctgctctcctcctcctcctccaatatggtgaccagttcctcccgcagcgcccccatctccagccccaggctgcacagctgtcccagcagctggacatccactcggcgcaggttcccctgccagtaggaaggggacgtcacagggatgccaccccagagagcaaggggtctctccaggacctgggtgagagcaggtcccaactcatgtcctggccacagcgcctgggcagggtcctcactgtgcccatggaccctaactgccttcctgcttctcagagtgtctcttgatctctaactcttctctttgtctctccatttcattgtccctgacttctctctctctgtctcctccctctcttatctatatctgtccctgtttccctttgtctctgtccccatttattttttgtctttccatgcccctgtctctctgtctttatgtgttgccatttctctgcccctgcctttggctctctttctctcgcttgccctctctctgccctccccaactttctcaaattcagtctgtctctccatctctgttcctgctctccgtctctgcttcccacctctgtccctctcttttgggatctccctgtccccacctctgttcccgtccctcactctatgtctgtctctcggtgtctgtacatgcctctcatgtctctgcttctatctctcagattctgtttttcgatctctggccttctctatttttgttcatttccattcattctcatttcctctctttctctttcccttccaaacccctcactcaccagctcctccctgatccacagcagactatcgcaggcacctccagtgtctgcccctgcagtcctgagggtctgaccagggatttccactggggagacctccctcagggcctgggggggtgggcccagccccggaggcaccagtccagcctgattcagctgcctccacagttccatcgtctctgagctatggctgcaaggagcaggaagtagcaaggtccagggtggcctggtcccctggggagctgtgtgcgtggtggagagtaaagggcagagggagtgggatgggggttcctgggaaaggtatcccaaagtccactcttcagagagaatcagctggccttgtgcttttctttttccttctgaagtctaacctcaactctgctcacagggttcaaacatagcctcttgcagaggtctaactccacccttccctgcctgtctcaggcctgacccctcaggggcgctcagtgtctgtagatgcctggcaccctctgtccttccacctgccccccaccaccacttctccagcctctcctcagcctccatttgacctctggcttgcccatagcttggtccttgcttgtcctcttggcacgggtcatcctagggctttcccaccagtgtgcctttgggggcaggaatggctcccaggggcaccaagacagcaatcccttagctggagtgcctgtgtccaggctgctggcctagggccaagcagccaattctgctgaccctggacttgcctatgggtatattatccctgttgagggtgagggcttctgctgtggaaaagtctgggaagcactgcaggcctctctcggccttggacccttccttcagacccaaggtgcatatatatacatatatataatggtagatcacgaggtcaggagatcaagaccatcctggccacatggtgaaaccccgtctctagtaaaacacaaaaaattagccgggcatgctgccgcgtgcctgtagtcccagctactcgggaggctgaggcaggagaatggtgtgaacccaggaggtggaggttgcagtaagccaagatcacgccactgcattccagcctggcgacagagcaagactccatcttaaaataaacaaatgaacaatatatatatatatgtattttgttttttgagacagagtctcgctctgtcatccaggctggactgcagtggtgcaatcttggctcactgcaacctccgcctcccgggttcaagcgattcccctgcctcagcctcctgaacagctggggttacaggtgcacgccaccacacctggcgaatttttgtatgtttagtggagacggggtttcaccatgttagccaggctggtctcaaacccctgacctcaggtgatctgcccacctcggcctcccaaagtgctgggattacaggcgtgagccaacgcgcccagccccaagtcccttttaccatagaaagtaacatagtcacagtgcccagggattcacaggtatggggagagggttcgttattcagctgccacacccaccttcctaaacctgctgcccttccagtttcctcacgtgcacagccacgcccgtctgcttttagtttctcaatctgttggcttaaccttcaaaacaggcccaggatttgagcacttctcaccattccctctgccccatccccattcatctcttgcctagactgctacagcagcctcttttactggtcccctgcatccacccttgccctctaaggcaagggtccccagtccctgggccaaggaccagtaccagcccctcgcctgctaggaactgggccgcacagcaagagatgagcagcgggtaagtgagcattaccgcctgagctccgcctcctgtcacatcagcagtggcattagattctcataggaggcaaaccctattgtgaactgtgcgtgcgggggatctaggttgcctgctccttatgagaatctaatgcctgatgatctcaggtggaacagtttcatcccaaaaccatccccaccccacccccgacccccagtctatggaaaaattgtcctccacgaaaccagtccctggtaacaaaacggttagggaccgctgctctaaggtacattctccacctggcagaaataatctttacaaaatgtaaatccgattttgacactcccttcttcccactgtgaatagaataaaaccctaccaggcctgcaccgtcagcccctgcccacctctcaacccagtctcctatctctgtctgcaagctggttcccacctcaaggcctctctgctctagaggctacctctccctgcagcgcttttcccctagatctttgaatggctctttccttatcattcacttctacttcaatgtcacctcttcagagaggcctttgctgatggccctacacccagtcacttttttttatctgcttctcatcaaaattgccttgctgattcctttgtttcttattcatcctctcccacatccatcctctcccagcccagaatgttgacttcctgagagagggactgggtctgtcctgctcaccatggtaacctcggcatctagaacagtgcctgccatcacgtggtaggtgctcagtaaatattcttggaactaatgaatgaataattctatccacaagacttcacaatggctcttcatgctgcgatctagctttcaactccaaactggtcttgagatctcacctcagtctctaaccttgacatctaacctcttcacccactctcttacctgaccctaatttttaaaaatgacgtggtcagcttttcagccccctcattccctgtttttaggaggtagtgagtggaagctggaagaataagaaagcttggggagactgcaattgcagtcaggaaagaaaggtactctgccgggaagaacaccccatcttctcctagggaaagattgtggagtcctggggtttgttttgtttttcaattttttgttttaagagacagcgtctcgctctgtcacccaggctggagtgcagtggcgcaatcacagctcactgcaacttcgacctccccggctcaagtgatccccccgcctcagcctcgtgagtagctgggaccacaggcgtgcaccaccacgcccggctaacattttattttttgtggatataaggttgccctatttctttgtggagataaaggctcccctatgttgcccaggctggtctcgaactcctggcttcaagcgatgctttcgcctcggcctccacaaagtgctgggttcacaggtgcgtgagcccgacctgtgtctcgttttgaagctcagggagagggcgctgtgagcaatccctaaaccctttaagagtaaaaagtgcgtgcacctttaagaggacggttagaaaacgcggggcgtggccacaggagaataagttcgcgctgaaccaggagcgtgggataagaccggccccttccggttacgaaaccttagcaagatggcggctccctgggcgtccctgcgcctggtcgcccccatgtggaatgggcgtatcaggggcatccatcgcctgggtgcggcagtggccccagagggcaatcagaagaagaaaaggacaatactccagttcctgaccaactatttctacgatgtggaggctctgagggattacttgctccaaagggagatgtacaaggtgcatgagaaaaatcgatcttacacctggctggagaagcaacatggtccatacggcgcaggtgcctttttcatcctgaagcagggaggcgcagtcaagtttcgagacaaggagtggatcaggccagataagtatggccatttctctcaggagttctggaatttctgtgaagtgcctgtcgaagctgtggatgccggtgactgtgacatcaactacgagggcctggataacctcctccgcctgaaggagctccagtccttgtcgctgcagcgctgctgccacgtggacgactggtgtctcagccgcctctacccactggccgactcgttgcaggagctctcgctggccggttgcccccgcatctccgaacggggcctcgcctgcctccaccacctccagaacctccgcaggctggacatctcggacctccctgccgtgtccaaccctggcctcactcagatattggtggaggagatgctgcccaattgcgaggttgtgggagtcgactgggctgagggcctgaagtcagggccggaggagcagcctcgggacacagccagccctgtccctgcctagcctttagccctgtccccactcacgtggcttctcagcgggctgcatggaatgtctggtagctcaccacacttctggcttccatttgtcttcactcaacgtcagggtgggggagtggtgctggccaatcacaggagagagcgtgagttcccagtatttattcctggctgcccttggctaaaggtcacagctcctgtcaccctgtcaggcagccctttccatgcccctgttcaggcctggggaggtaaaggctcaggctgttagtagccgcagagagccacactcaccttgtcaggagactcttctcaaactgtccttatgtgagtgcactgccatttcttgcagggaccctgactgacacaggggctactactgacactttacagggatggttctcccccgtgcagggccgctgtgcccactgcaggacatgcagcatccttcgccccactccactcactaaaggccagcgcaccccaggccccatagtattgctggttatggatttattgactttatgttccaaattcagctttttcagttggctgttttttgaaaggggataagctttgtcagtagagggcaccgaacaggcattataggaggaaaggcgcctccttcgtggttcttgttggcctccactgaggcacctctctgggaataacgttccccagcaccccaaatggatttccagtcaattcagaagcattttaccagtgaagccctcattattccagttcactgttaaagccagtaattctctatattaaactttccctgttcggtttatactccggagtataaaccgaacaggctatcagcacccctactagttctaaccacatgactcctcccccttatactaatagctagccaatcccacctatcaaaagaaaccacaacccgaaaaaaactatatattaccatactaatcctactacaactattcctaattataaccttcaccgccacc

SEQ ID NO: 735299 - DNA, 188257 bp, Homo sapiens
ctccaaggctgagggatgaggagacctgctgaggacccagggccttatctttccatcccactccataggtcccagtattgactgatgctgtcttcacctcctagcctcacttttaaccttctggcacccgcccaccactgtccagttcactattgaagccctgccgtccagtgctgcagagggaaaggatgttcttctactggcctgcaatatttcagaaactattcaagcctattattggcacaaggggaaaacggcagaagggagccctctcattgctggttatataacagacattcaagcaaatatcccaggggccgcatacagtggtcgagagacagtataccccaatggatccctgctgttccaaaacatcaccctggaggacgcaggatcctacaccctacgaaccataaatgccagttacgactctgaccaagcaactggccagctccacgtacaccgtgagtgattcccccatacctctgggtgctggcggtcagttctgcttcacacacatgagattgtcaggcctgggctgtgcctgcatccccctctgcattttgtcccgtgttgagatttgggcatttagtgcaggacacacacatggtaggtaaacttcaacagatcagaattcctttcctgcatccaggccctgcagacactgatggcgggggcgggggggcctcagcagggggaggtcagtctcagccaagcaccccatgccctccccatgaacctgaccctgagaaagaccctggagaactgggtcagggcctggcctgagggcgtcctgggaacctcacaaaagcccagcctcaggactcctgactccgtgtgaccccgggaagcctgtgtcagggctggggtgtggtctcctgggcagggcttactgggagcaaggatttaccagatgtctgcgggctgtggttcctgaagcttctcatcagtgagggctcagctcccagagtctcatctagacaaggacagagcctaccactttccctgggactcagcctggagagggcagggggacaggattactagggcattggccccctgaatgaggagcttaagagatgcccttgggcagtcagtggcccaggggtaggaacagaggggagaaaatgttcctggcagcttcttgtccaccggggatcatgcccaggggtgctctcccatggaggcaaataacagatgctgttgatgtgaacacctcctctgtgccaagcttcatgtcagatcctgtgaataatttaaagttcattcacagacaaagtggcaagcctcagaccattttccatttacatattgtatggaggggaaactgaggcacagagagatacagacaccggccacggtgggcagatcgcagctggcagagtcacatgagggctgtctgcagctgctgccacgtcctctccttcatccctggtgccttactaggtgtctgtggaccttagaacagccactggttcggatgttttcttcttaggtgtctacagctcggagggggagattctggtctggagagttatgagtaaatacagaattaatcagttttttcttaactaaatcacctgcctcaacaatcagtcagtgctggggaagttcaggcctcctcgctcaggtccacaccccgcatctctggacatgaaatggcttcgtgtgttttctgatgtgtgggtatcattccaacaggaggataaaggggaggactttgctttctctccccattcacaccctgcaccagccagggcccagtgtgagacacatactccgtagttctctcatgaaggagggagggaatgaatgaaggaatgatctataacctcttcagagacagagacctggatacaagatcctaggaggttctgggcccaacgtgagacacacactctgtagttctcttatgaaggagggagggattgaatgtaggaatgatctataacctcttcagagacagagatgtggatacaagatcctaggaggttctggccacacctgttttctgtccctctagagcctaagacccatgtctcattcatctggcccgtttctcctaaatctgcccctgggagctgagtctcatctgaccctggggctgcagggctgtgggaaggttttcaggggagggatcaggcttgcgggtagtcccacacgtttgccttacaccctggagctctacctggttctcactatgaatatcccataataatcccccctatcctttctggggagtagaaaaaaagtaaatatttaaaaatatgccagagcatctgttcttcttagcaagttcagatagttattagttagcaggaataaatcgttattttaccagagcctcacctgctgggggtttatgggagcctaactgactgaggggggtgggaaatatccaactccagccccctctagccatcatgtcccacctaaaggagagaaaaaactgagaggcacttgtgacattcacagcccagggcacagactctatccaggaccacagaacccctccctccccccactcaccaccgcatcactgaacgcctgctcacccaagttcctgttgcccagtacatcatgtcctggctttcaacaaaaactacaagacagactagaggcaaaaaaaaaaaaaaaaaaaatgcagttcgaaagacagaacaagcatcagaaccagatgcagatgtggcagggatgtggcagggatgttgaaattatcagaccaggaatttaaaacaactctggggccaggagcggtggctcatgcctgtaatcccagcatttgggaggccgaggcaggcagatcacctgaggtcaggagttcgataccagcctggccaacatggcaaaaccccgtctctactaaaaatacaaaaaattaggcaggcatggtggtgggtgcctgtaatcctagatactcggaaggctgaggcaggagaattgcttgaacctgtgaagcggaggttgcggtgagcctagattgtgccactgcactccagcctgggcaacagagcgagattccatctctaaaacaaacaaacaaaaaacaatactggctaatatgctaaaggctgcaatggaaagcatagacaatgtgcagaacagacggatgctgtgagcagagagatggacaggctaagaaagaataacaacagctactatatctatctatctatctatctatctatctatctatctatctatctatctatatatatgtatatatatgctagagatcaaactcactgtaacacctggatctcagagtggttgtgaggatgtttattaggagattaaagagattaaagcagagttatacacagggcgagagctcaactgatgctatcaactagtattcttatttttttgatgttgttattggcaataaaatcaggaacaatgcagtaaaaatttggttttatcatgtacgagttctgtgaccttccttgacttactgaggtactgtaagtctcagattctaactctgcagatggcggtgatgcccctctccctcaaggtgatgtgaggatgagatgagctgtaggtaggttggtgcccactgtgcctggcacatggaaggcccctgaaaatagtcaatgaacatcatccccgctcatcagcatggagttgacagtgagggctcgctctctgtgacaatcatggaatggaaaagaagaaacaagaggaagactgggcgcagtggctcatgcctgtaatcccagcactttgggaggccgaggcgggcagatcatctgaggtcaggagttcaagaccagcctggacaacatggcgaaatttcatctctactaaaaatataaaaattagcctggcatggtggcacaaacctgtaatcccagctacttgggaggctgaggcaagagaatcgcttgaacttgggagatggaggttgcagtgagccgagattgcgtcagtgcactccagtctgggtgacagagcaagactccatccaaaaaaaaaagaaaaagaaaaaagcaacagagggaagaggtgtgacatgagaggaagaagggatttaaaggtacaggagcagggcgaggtgcaagcacctgtgggagaatgtaggagttggtacatcccagtgtgtcaagtctgagacacagaaaatggtgcaaccgtggagagcaagggagtcagctatgaggacagcccaacagaccacactcaggctctggagcatttccttcctccctgactatgcccctgccctgcaatgccccttatggtttcccttggaacaaacttgggccttgtcccctttgccttcccctttctgcagaaaacaacgtcccaggccttcctgtgggggccgtcgctggcatcgtgactggggtcctggttggggtggctctggtggccgccctggtgtgttttctgcttctctccaggactggaaggtaccgcagcttttccccagcctcctcccacccctaggctgaccccagtcagggaggagggagaccccgccctgtattcagggccaggctttccgcatcctcccaaggaatccttccctctcattccatggctcctcccttgccagctgctgatcctaggctgcctcttcctttatgaatgtggcacagttaaggttgcacccctgagtgctgtcctagttccctaacacagcaaagccacagctgcctggagggaggaagggagggagggagggagggagataagacgggagtgctcagaacctggtaccttctgctgttcattgaatttacccacccagtgaggagggatttgcaggcttgagatccatggtgggggtcctgggcatggtcacgcagtggggagtggcaaagcctggacaggctgggtagggtcagcaccccatcgtgattgatgtccctgaggtgtgagatgggagaacctggacctcaggacctgctgtcctttatgtctcttgccaaggggtggagagagagaggacaaggccattgccccatttcagcatctccaggcctgaaaggagggtctggccatggcagggatactgagttctgggagaatatgatacatgctccttgcctccccatgcccccagctcccccagtgtcctgcacacacagccggccctgctttccctctggggccttgacccttcctctcaggcaaacgcaggtggtctgattccctccctgagtcctcagtccctttcctgggtccctgggtcaatgttctcctcacccggcatctgcctgggggggtccttcctctctggccaggacagacgtgactgcttaaggcctatcctcagctccccgtcctcggccgctcctaccacgaaactgatggagacaggaggccttcactccagtccttgaaaatggagtcccttccttgtcctttattctgcccctaaacctgtgatttctccctgcaccctcatgaataatcctgacctttcctagggccagcatccagcgtgacctcagggagcagccgcccccagcctccacccctggtgagtgtcccttcagcccaggtgtgggagcccctaggcctgccctacggtgtccactcctgccagtcaccccctgggggcctctgaccctttctttggggctgcaaggaggatgtcaggaaacatgacacaggggaccccgactgtcttgttcagactgatctgtgggctctgggtcgtgggtcacctcctcgacctcagctgctcaggtctcccctgggaagaggctccctctccctgattctctgggagctgaggacccctacactctcctgcaggaggggcccaggctctcctcccaccctgctgctcactcctgtctctgtccccaggccatggtccctctcacagatccaccttctcggtaagcctgttccctccccagcccttttctactggggtcccaacagtgcaggctcagggcagggggaccatcaaccccacagcacagcactgacccacctttccccagaacagtcaggtcaaagtgagtgcctccagccaggatccgggcctctctacagggccaggaccacccacgccatgtgctgacccctccccgggaccctctacacctgaggagaaccctggagtccagcaggtgcagaatggacactgggaccatcagtcagaggcccacattaacaagggtgcggggtgggcccagccaggacaggggtcagggtgttgtgtccacactgggaggctgagctcaggggcagagctggtcaatcctgaggggaaatgagtggaagtggaggcagggaagtaagtcctggccgatcagagacaggaaccttccaggctgggcttccgtgaccctccctccctgtcccctgacatctcctctctcccctgcccaggcccctctacccagccccagaacagccactcccatctatgaggtgagtgtgggccatggatgttctggtcccgcaggctccaggggacccaggatctgcccccaccagcacctggctgagctcagattcaggaaaatgcagtgaaaatgagaacaggtggtggtgagcagaggagggaggggcctgggaacagggaccccctgagcacagccaggttcagccccagagaagccctgggtgggcccagagcctgggagatgccagacactgttctgagaaggctacaggggttgaggcctcttctctgtttttacaggaattgctatactctgatgcaaacatttactgccagatcgaccacaaagcagatgtggtctcttaggttcctctgggagctgctcttgtgggttgatggagcgtccccaaagctcccagccctggggacggggaaggacatggagcctgagccagagaaccagctctgagtcctgaggagacacaggcctggggacagggagggatgggagtccctgctgaatatctggagaccctgacaggttgccctgggctctgggtgggccgggacaaaggcctctcatcaccacaggaagcgggggcttgcaaggaaagtgaatgggcctgtggcccacccggggtcaccaggaaaggatctgaataaagaggacccttcctctcattggctctttttctgctcacgggaacttagcagaaactcacctgaaactccgtgtccattctctcccgggtcacacagggaaaatatctccaccttgtctcaaccacagtctctcttccctgggaggcagaaataggggttgggagtcaggctggggtgggccctacacaggaaagggcaagattcacatgagccctgcccagccagccgagcgctcagctgtcctcacactaccccagggaccaaggccatgcacagccccagcctgggtccctctgtgaatgcatgtggggtctcaggagcacagaagatggggccatctgatgtccacaaaaggtgagcaatgcgggagcaaccatgggtggtataggttgcggctgtggcccctacgcagcctccagtgtcctgacccctgctgccctcttcacccaggccctggaggcccagtctatcactgtcctccacaaatgaacttacctgtccccaaatccaggatcctgtgtgcttatacctggccactaggttctcctctgtcccagtggctactgctcaggacatctttatccctggtggggcacagagaggggctgtcagagcaaccaagattaatacagacgcataattcagtccttgagcactacccaggactctggcccctcattgctcatcagttcccactttaccccctggcatggatctcactgagcaagccaactctttacacaggagcatccaggtcagaggtgcaggactcccccatctaaagctcatgcaggctcccatggcgatgggacaacctgtctgctcctctccctggcccacagccctatctcgcctgcagctcctccacacacctgggacagcagttctcagcccttccctgagggcccctggaagggtgatgatctcatataggttcacttgaaccaggtgccaccttcccacaagtgagctggtgcctgcactaaagcacagagccacagttcccaagagtgttctgccactgccacaggtcccaagagtgttctgccactgccacaggttgttcgtcctgagatgagaggtaagaaaacaacccgcaatgggttgttttatatcgggatttgcatcaggatttagctctaaatgacccctgatcccacctgcacacagcgtcagatgagacaaggtgaggcctctttagttttctgttgaggctgtgacaaattaccacaagcttagtgacatagaaacctgaaccaaagtgcccacatggctgtgttctttctagaggctccagggaagagtgcatttcctctccttttccacctcctagaggcctcctgcaaccttggctgtgtcctctttctccatcttcaaagccagcagcacagcatcttgaaactattctgtgccctgcttccatccccacatctccacctcctcccacctccctctctcacttaaaaggaaggagccttgtggttattttggacgcacctgggataaaccacaacaacctccccatctcatgatccttcctttaatctgtaaagtgtcctttaccacgtgacatgtccacagatctggggatgaggatgtacacatctttgagaggcccttgttctgtccatcactcctctcaaggccatcttctcatcatcgttcactacaaactacacatgggcacctggatgggttcatcatgactgtggcgtcagttcctgcattaacatccccagcaccctccagatcctgagagagggagacggagggctctccatgcccctagtacctctccaccttcttcttggtgacatgcttagttgctaagaataacagaaagcggaggtgactgaaagatcacaactcaccggcccttcaatagttcgtggacatcagcaccacggacagtgactcagtgaggctaatttccaggtggcagcagggagcatgcagataggagggaactgcaggaaaagctgcccattctattctatatgagaaagagtgtaagaaagaggaagctattacagggataatgctattcttctctaatccataaattgcgaaacctttgcatgtctggatatcatggtttttagcacatctgctgccactccctgcagggctgattgctgcatccaggatgtggtctcttggggggctcacagcctgctttggcctcatggtgagtctccctgcccctgacactcaggccactgtctctgcctacaacatggtgggaaccttccatgattaacgtctgattctctgtgcctgacctttgaagcacatccatcactcagcctggagcatccgctgagctcagcatcctgctcctccatccccagctgagcccttgaggagatgcttgagaggatctcctgggctcctctgtgagctcctccaggctgagccttgtgcttggtgtcagaggcctttgccatctgcttgttctttccataggcaaataatcctcctcagggacaagtggggcctgaagatctgtctgaatatctatctatctatctatctatctatctatctatctatctatctatcatctatctatatgtatgtatatatgagaatgctttattaggcaaaactgcatactatgaacatgctttaaaatgcaacaggatgagatgtgaagacataaagaacaagtgtgtagtgacacatggctatcagaacacactgaagaatccacaccgcggccgagagcagtggctcacgcctgtagtcccagcacttttggaggctgaggcaggcagatcacttgaggacaggtgttcgagaccagcctgaccaacatggtgaaaccccatctctactaaaaatacaaaaaatttagccgggcctggtggctcatgcctgtagtcctggctgttcgggaggctgaggcaggagaattgcctgaacctgggagacacaagttgcagtgagctgagatcgcaccactgcactccagcctgggagatagagtgaggctccatctaaaaacaaaacaaaacaaaaagaatccacactgcttccccgcttcactttacccagaaaaggaatgttctaggccacttcctcttcagcacacatccccagggaactaaaataggttcacagtcacccccatcttcctcattcccatcacctcttacccacagaggcatctctggtcctacagatccagccctgccttcaagaggcacaggtccaacccatccagtgtccctgctagtcacacacagcactcagggtacaatggagggcttctgtgctttggatgggaacaaaccccacctcacattcccacacctgagaagccaccagggtcctctctgtcctgtcctcacactcaatgtctgtcctgggtcacccttgtcatctctcctggaaataggcatggctcctgacaggtaggattgaggctttgtcttttcaggagtccctcccactctgagcacatgaaactgctcagctccatgcaaccctctctcaccaggggccttgttctctgggtccctgaatacctgggtccatgccatgtacattttaagaaaaatgacagtgactctcaccctgacatcctcacccaaggcacgtgtctgacaagaatcaccaggtgagatacctgtggctccacacacctgaggcttcactgcgcaggggtgtcctcatccctctcctcccacccctagggacagtaagcaccacaggctgccttggaccaccagctccccctcccagacacagcctcagatctatactgacatgctacatggagaggctctgatgaacagcaggtattaggaaatcccaccgaaccaggtgccacttgcggccccactcctcctcatatctgtgactgggacagacacacataacacacctctgttcaccgcccagcccccaaggtcaatcacagtctgcttctcccctagatccactgctccccatgtcttccgtcctcagctgcatcctgggtggcctccttgctgttcttgtaccccagaggcaggttccaacctttgtgatgttgcctgcaatgcccaaactttcccttccccttccccttcccttttcccctcccccttcccctccccttcccctccccacccctatcccttcgtcttcccttgtcttcccttcccttccctataaagccaaacatacccatccacctaccttgtggtcaaagtcatcagcctcctgctccactcagtgttctctgaccctgcatatggaggtggtggcccctcctagaacacccaccactcactgtcagccttgcgtggtaatcacagattttgcaggggttacctgtgttcaggtgtgtcacctgtggaaccagaactcttggaaggactggcagagggagctgcttaggatatctcagggctcctggcatctggtctaccacagggctattaacaacagcacttagggacaaggtggaggatggacggttaagagggtaaatatggatgatgtgtgggcaaagaataggacacaggaacacatgcagtactcaaataattatgccaagaaaggtgaggacatggagatggacattcccatatacttctgatgggactgcagtttagtccctacagcaacattgacctcatcatgtttaacgcgcacacgctctgaccactatcctacttctgaaggcctccctgtgctgtgagctctgagaaggccaagcttgcctgttctgtctctgctaaagccagagaccagccaatagcccagcacagggtacttcataaatacatgttgaaggaatgagctccaggaacagtactccacatggtagagatgtgtgtatgaggatgttcactgcagaaggtcatgtcaatgtgacaagtgacgagcagcctcaaatccagcaacaggggtgtgggtaaaagatcatagtgtagccatgcaatggaaccaatgaaaaaaccacaattagagcaaatccacatgtattaataaaggaggtgccctccatacatgctgcacctaacagaatgttgccaaataagaatgaaaaatgatgatatttgggctgtaaaaactagaagtcagctaaataagaatgcatcgaaagtatttgtgaatgcttacaattttataatgccttggcatccgttttggatggaagttggactttctcataccagaagcagggctcagtcacctttgaaatagtttccagttctccacctccttccagttcctcagtgtgattgatcagatatctgatttatacaactgcctcctggtgacctcctccctatgggacttccggatacagcccgtatgactgccccactgaccccacaccctgcctgctgcagtgaccacctctaattacctggatctcatgtctgcttgcattaaatccaccaattaaaactccctgaggacaatctgtttgaataatattctgtaccctaataaaggccttgacccatgggttccccctctgtcctccccatactgcccctgacctctgtgtgtgtgtgtgggtgtgggtgtatgtgtgtgtgtgtgtgtgtgtcctccagacagggcctgtatcccccaggacctgtaagtaataaatctttattttcatcttatgtctctcgcaatcattggcaagagctctgcatcttaaagatcgcaaatttaagaaattggtgtagtcggcacaatagagtacctcttctgtttagcacaagatatctcggagctgctgaggcttttaacatcctcgccggtgtggctgcctcactggtgaggccgttctgttcagtgcaattcagttgctccactgtgtgctgctgtgttgctgctgtagagtgctgccatgttgttctccccaaattgttaccgagtaggaacctgtaatgtgctcccaaggtggtctaccccatgagaagggggattctccatctagggcaagggctaggtgtgtttctggaatcctaatagggaaggcatccacagagggtgaactccactcctccttagagtgaggagtgacatttcccatttattttccccatggaggtgccatgtattgactttttctttcactgtcccaaggttgagccaaggtgagctatggagaccagggcaagataccatttctgttagcaaagcaaatgggtgacaacgtgtggagaagctgtggttctcctgatggatatagcagagtgccatttagtaaaatcttgtcaggaggctgcccctggttagaccggcagtgtctgtagtcactaaggtggatgcgaattttaggccctgggccatggataatccctgcagacacagccgtggcttcatgtgatggggcaatcccgggctagtggctcccttgtttctgcatttcttgctgtggttgcacaatcaacacctcaggggttgattgggtcaccttggaaagagaaacagctgcctaggaggctggtgcacatggaggccaccctcaattttattctgctaacaagttgtaagattaaaacaacagggggctttgggtaccatcaggaacttgtcaagtaaacatccaaagacagaaagaagaaaaagaaaaagacattaaccgtctagaaatacaagccattttaaagattttgcttaaaagatgcgcttgggctgggagcggtggctcacacctgtaatcccagcactttgggaggccaaggtgggtggatcgactgaggtcaggagttcaagaccagcctgaccaacatggtgaaacctcgcctctactaaaaatacaaaaaattagcagggcatggtggcaggtgcctgtaatcccagctacttgggtggagaatcgcttgaacccgggaggcagagacggcagtgagccaagatcgcaccactgtactccagtctgggcgacagagtgagacttcatctcaaaaaaaaaaaaaaaaaaaaaaaaaagacgggcttgtttcgtcgttgtggagtcatcccagagagaggctactccctagagtcactgaccacctttcctcctccatcttttcctcttatcattctagagacagaaaacaagaatctcagctttaggtggctaacctcaccccccaagaaaagaaactaccactttgattgactacaaatccaagaaaaataaaagagaaactttaaaaagtactgagcaaaccacaggtctagcaaacataatgctagccctaggttacttattcatttacaacaaacccctagatataggaggaaaaaataaaaggtaattaaatatatacacatacaatattttaatataaatatataataaatagttaaattatgtatgtataatatgtaactaaatcaaagtaaaatttcatactttgattctattggaaattcaaaattcatttattaacttatatattaaggaatttatgtaaaaaaagatttttaaaagggcaccaatttgcttttgtgtctctacaacataggatctaatttaactttacatttgctaaatacactaattgacaaatattcatggatttaatcaatactggggctcaaattgtagccacacgtgggaatcccataaatttaaacactctgtccctattatcttgagaagaaaactaaatataaaattgaaaaaaacaggtatgtctcaatttacctgtaactttgcctaaatttcccggagtcatatacccattgctgtaaaacattctctattggacataggtgctctgagacaataaataaaatagaagtgtttttggtacttagacattggcttgacaaaatgggatcccatgaaacctcagttaagatagtgaatacggcccaatgtgagttgaaatggggcctttaaggattaaaacttattacatgaaacctagtaagtaatggggtgattatccatactgcttctccatttcatagcccaattttgacagttgtcaaatctggaaaaaacaaacaaacaaacaaaaaaacccctgggaatctgttgcctcacagagacacaaagtagacatcaaaattgtatatctcagttccagttccaaaatggtggcatagaagcaagctggctttactccttcacacagaaaaccaaaaacaaatatacagcaccaaaattattaccagatatattccagaactcaaatatgaaaatgaaacagttttcagagccacagagaagtgaaaaaaactcccgacagatgacaaaagaatcagatttccccatctgtaatgtccctccctgccccattctgcctggtaccaggtgtgtggaaaattttaccccaactcatggtttctacactgggaaatgtaagatcaatgcgggcaaccagtttctgcacaatcctgggttccctgtccctgccttaacccacaagaagcattgtgagtgcccgaagggagaaatttccctgaggacagtcaaagagtggggaggcaggactaccatctccttccctggaaactctgctgtgtaactcagccaagggagacatgaaatcagactggtgtttcagcagctccatgttgtagtaggtttgtttcacaggtatcctgggcatggacatctagccagctttcccacactgccaggatatcccctttgggacctccctcagttaggaagggcacactctgatcatttactagggccaaggtaaaccctaaaggtaacttagagatgaaaaggaggtagtgacctagcagtaaagaactctaagaaaatctatccaataaaaatcaaaacaagccagacaaagactaaaataaataatgaatccttcaatgtaaagacctggacttacatccacaagaaacagtaagcaggtaaccatgatctccccacatggacaaagtgaggaacaagtgactgatcctgatgagatggtgatgtgtgagctctctaatcaagaattcaaaactgcagttttaaggaaactcaatgatcttcaagaaaacatggaaaagcagttcagaaatttatcagagaaatttaacgaagggattgaaataatttaaagaaaacaaacaggaatcttggaattgagaaatatatttgctgaacaggaaaatttattagagtctctcaacagcagaatggatcagaggaaagaatcaacccaaataagactcccccaaggcataaaataatcgaattctcaaaagtcaagggcaaagagaagattttaaaacagaaagagaaaagaagcaaatggcataaagaagctccaattctgtggcaacagattttcagtggaaatcatacagaccaggagggagtgacatgacattctcaaaatgctgaaaaaatattgacatttgagaatactttatccagtgaagttatccttcaatataaaggagagagaaagtttcctagacaaacaaaagctgagataattcacaccatcagactagtcttcctgtaaatactaaagggtaaatactaaatacttcaatgtgaaagtaaaaaaaaaaacactaacatgcaaaacaaccacaacaacaataacaacatttgaaggtataaaatccactggtgaaattaagtacgtagacaaacccagaatactcaaatagtaattgtggaaagtaatccaatcataactctagcatgagtctcaaaatataaatctatcaaaaacaataatacattttaggaggccaaggttggcagattccttgaggtcaagagttcaagaccagcctggtcaaaatggtgaaaccccatctctaccaaaaaatacaaaaatttgcagggtatggtagcacatgcctgtcgtttcagctatttgggaggctgaggcaggagaattgcttgaacccaggaggtggaggttgcagtgagctgagattgcactactgcactccagcctgggtgacagagggagactctgtcttaaaaaaaaatagctacctgtttggagaaaggtaatataaaatatgtaaatagagacaaagtcaaaatttgcaaaggatgaaattaaagagtagagtttttttggggggttttctgtttctattattttatttgtgatctaagataagttgttaccttttcttctcttgaagatactttgttatatctatgtttttggaagtcttatggtaactgcaacgcaaaaaatctatgatagatccactgaaaataaaaaacaatgacttaaaacatactaccagagacaatcaaccacaaggaagacagtaaaaaatgaagaaaggaagaggggagttacaaaacaaccagaaaacaggcaacaaagtggcagtagtaagttcttacttaaaaatattgaacactgaatataaatggactctattctccaattaaaaggcatagagtggctgaatgctgcctatatgctgcctacaagaaaccacttcatgtaaaaagatacaaatagactgaaagtgaagggggtggaaaaagatatttcatgcaagtggaaaccaaaagagagcaggagtagctatactgatatgagataaactacaaatcaaagactataaaaagagacaaagaaagtcactatgtaatgataaagcgctcagttcagcaagaggagatgccaattataaatatctatgcatccaacacttgagctcccaagtctcccaagtatttaaagcaaacaatagtggatctaaaaggagagatagactgaatacaatattaattaggggactttaacaccctgctctcagcaatggccagatctttcagacagaaaatcaacaaggaaacttcaaagttaaactacacactagatcaaataggcctaactggcatttacgggacatttcactaactatctaactgttacagaattcacattattttcatcagcacatagaacattcttcagaacagaccacatcttaagtcccaaaaccagtcagaataaattcaaaaaagtttatatcacatcaagcatttgttctgaccacaatggaataaaactacaataaatgaataactttctggacacatacaacctaccaagatggaagcatgaaaaggcagaaaaacccaacaaaccaacatgaaactgtaacaaaaggaaaacccaggaccgaatgacttcactgctgaattctaccaaacatttaataagaactaaaaccaattctactcaaaatgctttaaaaaattgaagaggatggaacactttcaaactcattctacaaggtcagcattatcctgataccaaaaccagacaaggacaggacaaaaacaaacaaacaaacaaacaaacaaacaaacaaaaaaacactacaggattgcttgaggccaggagtttgagatcagcctgggcaacatagtcagaaccaatctcttaaaaaaaaaaaaaaagaaaaaaattagccaggcatggtggcatgtgcctttagtcctagctactcgggaggctgaggtgagaggaccaattgagcccaggaggttgaggccgcagtgagccatgtttgtgtcactgtactccagcctggggaacagagcaagatgctctctcaaaaacaaaaagcaagctgggtgtggtggctcctgcctgtaatcacagcactttggaaggctgaggtgggagaactgcttaagcccaggagttcaagaccagtctggacaacatagggggactccatctctcaaaaacaaccaaccaaaacaaagccaaaaaagaacataggccaacatcactaacaaacatagatgtaaaagtcctcaataaaatattaacaaaccatgtttagaaacacatcaaaagagatcattcactatgattaagtgagattcatcccagggatgccagtatggctcaacatatgcaaatcaataaatgtgatccatcacattaaagagaaccaagaacaaaaaccatataatcactccagcaagtgcagaaaaggcatttaataaaagaatgggttgagggagtggagcccatagtcagagcagcagtggtctgggattttggaagtagaaagaagggcagcaccactggccaggaccaccagggaacacccccataggccctgggtgttgtgctccagggagggttccctctggagttattaatcttggtgtccactttgcccagctgcccctcacagggtcagggaggatgaagggaaagcttccttctaatgaaagttcagggactcacagttcctagagcctgtagggagaggaagatcttcgaggaagagcacctgggcattggggcgtttgagaggaagatctatgccaggtccaagtggacaacctgtggactctctctccagggacatacgggtatctgggaatctcctgtagcttaaagaggtaaagacctctccctttagcctgaggactggaggatgctggttcaggtgaatgagtcctgcaggggctggtacaggcctggagggtggtggtgtccagggccttgggttcacccttagcatgattcaggccgggcggtgtttcacatgagcaagagggcctgggttcattgcttcaggacaatggtgaaatctcatggtggaagaaatcttgtccttgccagtgcccagctttcatttggtcttggcccagagtgtcctccctagagaagactcttgtcccttcttcacactgcccttcagggatatgccagccttatgggataagatggggtggagactgtagatgtgggtgggaatctctccacagagtgctccttctctcagcggttgcaccttgtctcagggcttcagcttgaaatctgggatctccaagcccttccctccccagtcctggccaggaccacatgggcagatgcattgtgtgaagtgcatttcatttggggtgtcctctctgcatggcaccctcccgttgattctctttgcgcatgtcagagtgcaggcaccatccacacctcctgctggaggagggacggagctgttgactcctgagagctgatcatgtgttcccaccctcacacacaatcatggtccatcctctgagggacatgtgttgccaccactgtggagatggtgcaactgacagtaacaaacagtaaaatctggtactgaatgggaccttaagccaacaatgacaatgtcattccaaggtgtttcatttttattgattcaatgcaagtcacctgatttcattgactattcacaatagctcgataaagtaaatgcatcatcaccaccactttaaagaggaaaaaggtgcttgggcagtttgtgactactgtggtggctgctgcattgctctctggtaaagccaagtaggtggtgggtgcggcctctgggctgggatgatccaccctcctggtggtggcaggggagccaagctggagccatggcctgtgcagtggtagcagctgaactgaccgctgctgcaggatttgcaagctgttacattttgcgaagccatgaagcacataaaacctcaagtagaacaagtgtttcaaagtctaccaaaatctgccttcagagattattactacagaggtggatatgaacccaaaatgacaaaacgggaagcagcattaatactagataatgaatgaacactagtaatagtagggtaagccctactgccaataaagaaaaaaataagagatgctcattaacatgttatgctcttaaatcacgcagacaaaagagggtctccttatatagtagccacaatcaatgaagctaaagatttactgcaagatcaagctaaaaacagtaggtgtataatgaatttttaacttcatattagtttatgtatatgaatatcaagtttttataataaaatgcctccaaacaaagaatatttgatttagggtttaataacttctaagaggggactcagatgtttcctgtttcacagtcagtctgagagggtcatttttcctggagctgacctgggtggaggcctcacactgatactccccagcatcctctctcctgatggggtttatgctgagcatacagtggccctgggacagctccattctctccatgagtcacagacgctggtcatggaagatccactggataaggttccagagtcatctgtggggcaggtcaggatcacaacatccttttcttctgtgactctggtgttgctgactcagatggggtcggagccactgaccctgtggacaatcagtggaggtgctcaactgaaagtgggctgagggcacgtcttctcctccatccctgggtccttaaggtaactgtggaccccagaccaactgacacaggagctagaaagaaattatttaggaagttagtgagggtaagagcgtccttggcaaggtttcccctttaacaaaaagcagcccaagataattccttttctaacaaagagcagcctgaaaaattgagctacagatgtagatgagcaagatggaagcttgcacaggtgaattccagtaggtgtgccaatagaaaagggctgcctggaagccaggtatgttcaacatggagactccatcctcccttttctccattaccacatgtacagtaaaaaaccaggcaacatggcaccggccaggtagacaatccatctgcatgacaaaagatcagagtggggcagccagcaaatggcacagctggtctaaacaatctttcaccccctgtataaatcagacactgcctcctgaagctcatctataaaaccttctgcatttcactatggaagtggcaacccattttccccaggacccctctctctgtgcagagagctcttctctttctttcccctatgaaacttccactcttaacttcactctgggtgcctgcatcctagttttccatggccatgggacaatgaacctcgagtattaccccagatgaatgatgctgtttcacaatcactggttcagctcccttcttcttagggtttcacagctcggtggggagaataccacgcctcagtggtctggggagtgaggaacaaatgaagaattaatcagattttacttagaacgctatcacctgcctcaaccatcagatccatgttgggaatgtccaggcctcctctcttagatctatacccacttcactggacctgaaatcctgtgtttcccgatgtgttggtgtcactcctatgagaggataaaggagagaactttgctttctctccccactcacaccctgcacaagacagggcccaatatgagacacacactcgctcagtagttctctcatgaaggagggagggagtgacctcgagtgattctgccatctgtagtctgtgtaccctggccagtggctgtatcttcatatgcctcagtttcccctcagtaaaataggacacacaatgagaactaaaaataaaattctaattccccagtgaactgaaaggatggcctcttggccaagcggatcccagagttcctgatcatgacaggatgggaggttacacctcattacagcccctccctttggaagtttagaggtgacaactgactagcattaacgctaaaatcgagatcatgagactgacagaacagactctctgtggccataagataccaaattataaactcaacctaaggtcatgcaggcaagggctaagccacactttcctacatttaaagaataagctatgttctaacacagaattttctttctctctagcggctaaagtaacactagccttcgagataagcaatattgaaatgatcgcggctcatccaccaacactggctaactgacccctgttccaacagccacaactacacttcaattggacaggagactgatttcagtaactttctcctaataagagaccactgagcatggcctggttctgctggtatacagacacggtgcactgagtaccataatgcttgtttcatcttttgatgtataagacctaatttaatacatttaaatctgaattctccaccccaaagtgaacatggggtgcatgtagcatgcatgtttgttgatcacgcatgtgcgtgtacttcctttgtgagtatccatagctccacctataacctgttgaatatgtatacctggccaactcattcagcataaatctatcttccacattcccctcccttgaagtgcctgctattggtctctgctggaggctgcatcttctaccctggggaatggccagcctgcaggctgtaaccctgtgtaagaaataacctggttgggtgcagtggctcacacctgtaatcccagtggtttgggaggttgaagtggtagaatagtttgagctcaggagccagagactagcctgggcagcatagcaagatcctgtctcttaaaaaaattttagggaggagagtgaggatcagaaaaaatacctattggctattatgcttagtacttggatcatgaaataatctgtataccaaacccctgattacatatataacaaacctgcatgcgtatctttgaacctaagataaaagtttgttttaaaaactatctgggtgcagtggtgcatgcctatagttccagctactcgagactgaggtgtgaggagtgcttgagctcgggggattgaggctgcagtgaattatggtcccacctgtgagtagccacttcactcaaacctgggagacagagcaagaaccggtctctaaaaaaaaataaaaatagaaaaataaaatgaaaaatatatgaaataaagtctcctttccaaacgtacagatctccgatttttctgccaacaatgataaatggtcagtggcttgccatgttgtctgtgaattacttttaaaatattcacgatcacctgacctaaaggttggtaccaaggaaccgcctgaatacaccgtctctgattatttgcctccaacagagtgttccctgggcctgatctctggtggacaatgagctgctgggaacatcctctcttctctattcctcccctggggatgctgaccttcccttggagtctcctaagttccccagggcagtcggctaatgtcctagggagcttacctgtcttctccataccaagtctcatgtgaaggacgaggctttgcccttgcccagatgaggctctgggggctgagccctggctggctaccagctgcaagagccatggcccttggacagctggtaaatccttgttcccagtcagccctgcccaagatgcctcaacccagccccggcacaggcttcccagggtcacatggagtcaggatcctgggacaggggactggacaggggtttccagggctgagtttctgaacaggggcttcccaggggtcccctcactccaggatctgacatggtcctacaaggaacgtccatggggaggggacccaggagggggaactgacactgacctccccttactgagcctccccccaaccccatcagactgtccttcctctgtagcaagtgcctgcagggtctggatgcaggaaagaaattctgatctgtggaagtttgtctcccctgtgtgtgtcttgcactaaatgtccaaacccccaaatgggatgtaatgtagagggggacacaggcacagcccaggcctgaaaatcctgtgtgtgtgaagcagaactgacccccaacacccagagctcatgagacatcactgtgtacgtgaaactggccagttacttcttcattcacaagatctgtttttatgacttgtagggtgtaggatcctgtgtcattgttggtgacattctgtatcagcagacatgtattggggtatattgtctctcagcctctgtggcaggtcctggggtaattacttgagttcctagtacatatcctgtaattcccctttgtaccagttgtagccaagcctaaggcagattgtgggtgagtggaagaatctccttgccttctgcagcttcaacagtgacttgggcagtggtaggcaagttccagaaagttaaaagtgaggctaggagtggggagagagcatcagttaatactgggccctatgcattgaggtggaaagatggggccctaggtcctggacaggtctcttcatccctcagccttggagtgtgtgtgtgtgtgtgtgtgtgtgtgtgtgtgtgtgtgtgcgcgcgcgcgcgtgcgtgcgtgtcctactgggccaaggtcagcagcatgacctcccttccttcagtgcctctgaccttggcatttccctgtttggagtccttttccccaggggtctgcctggctccctccctactgccttcaggtcctgctcacattagggcatccttgggagaccccttccctgacacctctagagaccctgggtcttccctttctgacctttcgctgctgtgttccctccagggctcttgtcaatacttgacctcacattctagatacccttgcatgtctgtcttcctccctatgagagcatgagctctgtgagaacagggacttgtgtgatcttggttgcaccccagtgcctgggacaggctgcggactcctgtggatgagctcatgagtgttcccagggcccttcacaacgtgggatttattttccaatggctgaggttgttggctaagagctctgttggagttcaatcaggctggtgggaaaaatattagagatagttatagagatagacacaaatcttcttggaagaccaaaaagtttgcataactttggtaatagatctgactgaaggtggtccctttacctttagttaaacaaattaaagtagtaacaaaggaaggcagagtagtttgtctagccagcttgtttactcatgtgatcttaagactaaccattgatgtgccacaggtgcttaattgctttctacttgggaagtccacaatgtcaattaccctctaacggtgttgactcaagcctttgttaattaatcttactgaataaatatgagtctcactagctgatcaaggccatggtcacaactgtttataggactcagcagggagtctgtaagcggccctgacagactcagctggactggcaaagcaaaatatgtgtgtgtcagtgtacactattcacccgtcccccacagctggtgcccctatatgaggagtgctgccacagagctctgtttagtgtcccttgttttttttcttgagtattaccccaacttaaattgtgattattgtcatctgttttcaacattaactgctcagtgatgattcacttggaaaacattaacaatcgagattgtttcttcactaacaacctcagattatttagattttcctgttgtaatcccttcttcctgtttagtgtccaacagaagccctctgtccctctcaggtccccgttctctccaagaaaccccagccagtctctgtgctccctcctcccatccactcccagggagccctcccctcacctgtgagcagaagcgcctgccagggatgtgcactctgtgaggaggggctgagggaggccccatgggctctgctgtctgctttgtcctcctctgtggagaggagcttgggcttcagaaaataaggaggccagaaagtaaggaacaggctgagaaataatggggatgtgtcgaaaggtcacagatgccaacatctttgtcctatgcaatattatccataaaattacaggtttgagatatgcttaaattttcttctaacatgcattaaaataaacatataacttttaatagttatattaaattgtatttaatataaattaaatgctcttgtcagagctactgtgactgtcagctctgctgtccttcctctctctgtgctaagcctcctcccagggcagaagcacttcccagggccaggggtgggggcggggaaaggtaagtggcaatgaggatctgcacaggtagcctttccgcctcctcccctctcagtcctgcctccttgtcttcttttcctctttttctccaatctacatttcagttccttagaccacgctgtgagaagcaaggcttattgggacccccatcccttaacaggatgacctgtgctccccataagtgacctctgctgtgtctagggattggctctgtcagcacctcacagagagtccctggggcccccaaactcagtgttattttctctatgacacagaaacccctctgggtatgcaaggttttcctcatgttttctaatgtctgggaaggttggatttactcccagcagggaggtcacagagatgtccagggagtggggtcctagaaatggacaaatctagagctaaagcccaggtctacgattttcagttgtttttttctgcagtgctatgtgaccctaatttcctaggagtaactaaaatgcaaacctcagacatttgtagacattttatgatttttctctacagcttgtaccactgttattattatttgctttatgctttttcctaaataaatttactttacaaaacatccttgtcctagtagggtgcaggggctcacgtctgtgatctcagctgcttgagaggttgaggtgggtggattgcttgaggacgggaatttgagacaaaacatctttgtcctatgcaatattatccataaaattacaggtttgagatatgcttaaattttcttctaacatgtattaaaataaacatataacttttaatcatcatattaaattgtatttaatataaatttatatacaatacatttttatataataaattatatatataaatgtatatataatagtttttcttttttgagatggagtctggctctgtctcccaggctggagtgcagtggcacgatctcagctcactgcagcctccgccttctgggttcaaacgattctcctacctcagcctcccgagtagctgggattacaggcgcctgccgccacgcccagctaatttttgtacttttttagtagagatggggtttcgccatgttggccaggctggtctcaaacacctgacttcaggtgatatgccgcctcggcctcccaaagtgctgggattacaggcatgagccaccatgcctggcctatatattttatataattatataaagttttctataataaattttatataataatatataaaatggatatttatttaagataaagttattagttttatatatttacatatatttaggaataaatgtgttactgtgggagcccagtgcccaggcaggtagtcagtacatgatggttgtcattagggttaatactttggaattctggattttttcccaagagagtgtctacgctggaatattgggcttgtggctttctgctgatgtgcatgtgtgaagaagctacttccacttattaggacttgtgtatctgtctcgcagtttcactacctattttctcgtgatgttggtcaagtcgcctaacttttctgtgcctcatttacctaatttgtagaatatgggtaacagtacacaagtgtgagtgtgtatttcccaggactgaccactagagggcgtgaaggcaccggcacttactattacagcaatgggtgtagtagtgctcatggtcgtaaacatcattctcccatgaaaggaaccagggcttcctgggagaaataactgattccagggctggggccggaaagcacaagcggagcctggagcatctcgtgaggccagaaagtaaggagccggctgaaaaataatggagatctgtcgaaaggtcacagatgccaaccagaaggagctttgaatgaccaattttgagacaaaatgagcactataagaaataatgatagtaataaattccaacccataaatacccatgagttcctactaatataaataaataattgaatacataaatatataaggatgaagaaacagctttttcttacagcagaattccaattaatgaatgtagaaggaatgatcaaatagaaaatcactatttggctaacagcacagtcaattgtttgtaggcaagaattatcaatggactttaaatatgaatgggtaaaagtatgatgatgctacaactagtgagtaccaagggggaaaaaaaagtacgttgagaagaaacaggctacttccatattcccaaagtatcacttcaggagctacttattgattataatgggacaaatagtaacttacagtagagaaacctggcaacagagtctctccgaggtacaaaggctctcttcaggaaggaggtaaggggaaggaagaagaaaacactgtcctgcctcaattatttgctttccccattctcaagtgtacttcatagacattcaaagatatgtgttgatagtgtccacgatccacatggctctattatagtcatttattcacacatacattcagtgaggctttgagtgcctaatgtgtgcctgatatttgctagatggtggatgctgagaagatcaggtgtgctgctgtctctagggtgactgaatccacctgccccactttacagatgtggaaattaaagtgaaaaggatttataggattagttcactgtcacaaggtcactagccttaaagttacaggagtaaagcaagtttcctgacttgctagattttctgctgcaggtgctgacaatggtgagctccaataggagagaggacactcagagtgaagtgggagccctgaacaccctggattagccaagaggacatgccgggtccagctgtgaccgcacaaaggaccattggggatatttgtattctctttttcacttagagcttgaaatgaggaaaactaagtgcagaaaaccaagagtggaagatttttcacaaagcactggtaacatgcatcagaaaaccctgtgctgatgtctgtcacggtgtttctcactgaacggtaatagtctggctttgagtgtgttccctctacagcctggagttctgcgaggcagggaccaggtgtgattcatctttgtctctccagtgacagtacacagcaggctctgataaatatttcttacaaaataaaatggaataaaaagtagacatctgcacaggtgtgggatgactgagcagcagcagaagcaggaaaagtcagcgtccccagatcagctgatgtggtgttcggattctagataggggtgaggtgccaggatggggatgggggtcctgtggctctgctgccctgggggacacccctaggtttcacagtgcctgctgtggttgctgcactttgcttccccatgggaaagtgatcagagggtgtggggcttcaggtgaccccatgtgggaaatggccaagggaaggtggggtgggcggcacatggttttttttaaccaatatttgaaggtaggttgtatgaaaaggtgttaggcttatttcagcttatggggagtaggacagggattggtgagtgtgtatcaggtatattttggctcaggatggaaaagaactgtcacagtaacataaggtcttttgggaaattacatgtttactggcagagttcaggccagggctgggtgtctgaaaatacctgtcagggtcacttttatggttacaagggcagagcttggcttggaaccaggtttcttactaataccacatattaagtattataaaaactgtcctttgcaataggacattgctctatgatgcaggttgaggtccctctgtttaagtaattgtgggtggctgtgattctctcatctagtctgcgacttggacttcacctccatctgcagtccctctcctttgctgttgacactggtcagagttaagcgcatttactgacgatggtcacagggtggcagcactgcctctctggtattttctaaaacctcttcctggaactgagccagtctaagaggatgtcatgactaagaaaagggcactaatgaggtgaacagataattttttttttcttgtttctcctgtgaagtaacagagtggaggtgagcatggaataattgccttttagaaatggaagacaatggagagaagtgtttcgcaaaccttaatgtgttcacagatcccacacagatctttttattcaatacagattctgatttttctggtgaggcctgagattgtgcatgtctaaggagcttttggatgatgccattgctgctggttggcggaccacactttgagtagcaaggctcgaagatcatttagaggttaattctcactgcatctaatttatggatgaaaacaaaccaaggtccagagagagcatatacagcttgcctaacaaagccattccctaagtgcctgacttcttgcatttaaacccagggcttcagcctttgtccagttctcactccacacatcacacggtttgttcactgttgtgaacgacagttgtggcagcatctctttagtttaggaatccagagccccaatttcactaccctctttggtcttggctcatgctgtgacttcgaatagttttgcccttacttaaaatcttcagtggctcttttgtaatcacaagatcaagttcgaatatctctgtctagtgttcatggctttataacatatggtatctctttagtaaccttacctaacttccctgttttaaaattgtctcttgctgccatagccctccttgctccttcctgctccctaacaaactgtgttcacttctctctcagtggtagtgatgatggcatggcctctgatgttagactcatgtaacttctaatcccagatccaccaccaacattggcaagttgattcatctttctgaggataagcatcctcctctgaaataaacttagatggcggttgagaggggtaaataaaataacacacaaacccactctcatccctgagaccctcttcaaaactagcatataaaaatagctatttgaagaggttcagtgaaattcaaggtaacacagagaaggaattcagaatcctatcagataaatttaatagactgaaataatttttaaaaatcaggcagaaattctgtagctgaaaaattcaattgacaaaccgaagaatgcactaaatctttcaacagcagaattgatcaagcagaagaaagaatttgtgagcttgaagagataatatatgaaaactcagagtcagagagacaaaagaaaaaagaattaaaagaataatgcatgcctacaaggtttgattattaagctactcaaagagatacaagagaagggtgaaaaccaacataaagaaatgtaaaaaacaatcagaatataaatgaaaaattttctaaaatgctagctagtttttttttgagacaggctcttactctcatcacccatgctggagtgaagtggcacagtcatggctcactgcaggctcaacttcctgggctcagatgattctcccacattagccttccaagtagctaggactaaaggcgtgtgccaccaggccaggctaattttttgtatttttagtagagatggggttttgccatcttacccagggctggtcttgaactcctgggctcaagtgatccaggagattcactgccaaaaaggatataaccaagtcatatagtcataggttatctaaagtcaatgtgaaggcaagaattctaagagcagtgagacaaaagcatcaattaacttataaaggaaaacctatcagtctaacaccagatttctcatcagaaaccttacaaaccagaaggtattggggtcctaatcttttggcttcttaaacagaatagctctcagccaagaatcttgtgtagagtgaaattatatttcaaaatgaaagagagaaatacagtctttttcaggcaagcaaatgcttcaggatttgtcacggctagaccatcctacatggaatgttaaagggacttctaaatcacaaaacaaaagatttaaatagaacagaatagaacctcttgaaaccaaaaaattcaaatggcctataaaacaataacacaataagaaaacaaagtagataacgatcaacatgatgactggaacaaatattaacattgaatgtaaatgacctaacactccacttaaaagacacagattggcaagataaataaaaaatcacaaaccaaatatcagctgtcttcaagagactcacttaacatgtaaggattcttatagactcaaggtaaagagatgataaaagatattccatgcaaatggaaaccataagtgagaaggaatagctatccttatatcatataaaacagactttaagcaacaacagtaagaaaaagacaaataaggcaactatataatgataaaaggatcaatcaaacaagaagatattacaatcctaaatatatatgcacctaactttggagctcccacattcataaaacggttatgatgagacctaagaaaaaagatcaacacaaaacagtgagggtgtcctgggttttctttttattggacagcagtgtactagcctatcactttcccagtcaggggatttttggtctccccattcccctaccatgggttcatgccaaagtccatattttttattagtgtttggaattggattttttttttttgaggtggagtctcgctctgttgcctaggctggagtgtagtggcacgatctcggctcactaacctctgcctcctgggttcaagcaattcttctgcctcagcctcctgagtacctgggactacaggtgcatgccaccacacccagctaatttttgtatttttagtagaaacgagatttcaccatattgtccaggcttgtatagaactcctgacctcatgtgacagggaaacaggcactcagtgaacttcatgcgattgaggagttaatgataatgagagaagggctgtgaggggacagcactggggacaccagagcctgtgacgggctgagttgctgtgccttgggagatgcccttttgactgagccctgggaaggagggggtgtgggggcaggagctgcctgcagagggagtggcctcaggtgggcggccacctggctgcagggaagaggtgacagagttcgtgtgcagagcttggagggtgaggaggaggtgggttgaggtgaccttggtgagggtgaaccatggggggctgtgggccctgctgagggaggccagccagccctggacctacagggtggtttggtcttttttgtcccattcccagcatccactgagtggtgaaactctgcaggccagggaccatcccactggccagaaggagcgcacagtaggtgcccactcagtgcatgttgggctggacagaacctcactctgccccctgcccccagctttgggagctgcagcaaggtccctccccctagggatctccatgcctctgtctctgaggggtgagatggggagacttcaaagggccatctcagagtgtgggggatagagacgcagaagtgtgggggatagagggaggcctgggctctagacccaaaggaccttacacacctcctgagtcttttcaaatggtttcttctgttactttaaaaatgatgtaagtcatcatatttattgtaaatcccaggaatctaatcatgcgtaaaataaggtgtcttatccttgaccccaccccttccccaattaaatttccaggatgttaccactgtttgcagttggtgtgaatctctctttaataatactctgtttatctcacttgtcgttttacgccaaaatacccattgaattatattattgctgaagaccattcttttttttttttttttttttgagatggattcttgctctgttgcccaggctggagtgcaatggtgtgatctcggctcactgcaacctctgcctcctgggttcaagtgattctcctgcctcagcctcctgagtttctgggattacaggtgcacaccaccacacctggctaatttttgtatttttagtaaagacagggtttcaccatgttggtcaggctggtctcgaactcctgacctcatgatccaccctccttggcctcccaaaatgctgggattacaggcatgagccaccacacctgcccagaccattctgttctactgaatcatgtgtggtgggcacctcttatatcaatacatatggattttatcttgtgtttgttattggctcccctttttctcattgcatggctacactcaatgctttgtccacacccctgttcctgggttggaatcttgtgacagaaaatgaagtaacaaaggctaaagctttctaaagtggagtcaggagattgcaagacaattgcactttcaccagcaagagctcaaaccacagaatgttccaatagatttggataaacagctgaagtcagtattcaccagccttcaacatctcaactaggagaaccctaaaattaactaagcacatagaatggaatggacttgtgatttaggattccttctcagccaatgagctgcttctgaaaacaactttttgtggaaattacctgtaaagaaaaccctctcctgtgcttgtcttacagaacactagtcagggctgccctgattcagtggacccgaattgctattatttgtttcctaaacatatggtattttctgtgaccttcatctcaatcttttttttaagttactgggctgtttcccagttttcataatgacgagacattctgcagtgtttcatacacatgtcttttccccatgtggagtattgatccaggagctcattcagtcaacgcatgtttatgaagcatcctgtgccaggctgtgggctggtcactgtcttcagcagagagaggacaggcacagtcttgccttcacagagctcacagctcagggaggctcttagaagtgggatactggtcggagcatgtgcacattaaacatgatgaggtcaaggttgctatagggactaaaccacagtcccaccaagatcgcattgagttcctgtggtagaccagaggtcagggcccctaagatgtcctgagcagctccctctgctcagaagttttggttccacaggtgacacacctgagcacaggtgacccctgcagaacctgtgattaccacccaaagccaagagtgagtggtgggtgttctaggaggaaccgtcacctccatgggcagggttggggaagactgaggggagcaggtggctgatgactttggccagaaggtagggggatgggcaggtgtgcgctcatagggaagggaagagaagggagggcattgcaggcaacaacacaaaggttggaacctgccttcatggactgagaaaagcagggagtccacccaggctgcagctggggagggaagacatggggagcagtgggtctaggggagaagcagactgcgattgaccttggggactgggcagtgagcagaggtgtgttatgtgtgtctgtccccatcatagatatgaggaggggtgaggccgcgggtggcacctgggtcggtgggatttcatagtgcctgctgttccctagagcctctctgtatagagggtcagaatagatctgaggctgtggtctgggggaaggggctggtggtgcttaccatctctaggggtgggaggagagggatgaggatgcccctgagcagtgaagcctcaaggtgtgtggagccacagttgtctctcattagacatgtgttttgcgtgaggatgccagggcctggtggttattactgttgtcaagtttgcatgacaaggacccaggtatccagggatccagagcacagggcccctggtgaggggatgaggctcagatggggctgaccaggttcatgtggtcagagtgggagggactgatggagagacagagcctcaacccctcctgtcaggagctgtggctatgtccaggagagatgacaaggatgacccaggacattgagtgagtcattgagacattgaaggtgaggacagggcagagaggaccctggtgactgctgaaatgtaggatgtgaggagggctctgacccatgcaagttacaggacctccccacccccgagcccacagatgacccttaaattgggcatcctgagtgctgtgtgtgcccagcagggacactggataggctggacctgagtctctgtaagggcagcgctggtctgtaggaccagagtcttctctgtgggtgtgacgtgggcaggaattagcaagatgggggtgacaaggcttggcttggaggatctggtacagaagcccatgggcttggtcagctcagcttctcaggggctcagctggggctggaggagcaggatgctgtgctcagggcatgctccaggcagcgtgatgtgtgtggttccagggtcaggcacgggggtcaaaaattaaccatgaaaagttcccaccttctgtaggcagagaaaatggcctgattgtcagggtcagggagacttaccatgtggccaaagcaggctctcagcctcccagagaccacaccctgggtgcagcactcagctctgcagggtatggcaatagatgtgccaagaaccccaacatccagatgcatgcaaaaattttgcgatatataaaatagagcagatcaagtttccctgcaataacgttgttcctggttgtgtctttttcttgtaaactagacatggacatctttccagcagtctgttctcatctgccaccttcctgctgcagcacctcagaatgaacattcctgagacactgtccgtggtgctgacgaccaagagctatggaacagagtgtgatgtagaatcttctagttacctctgctctcctttcacttttaacaacagagcatcattaacaatgagaaggtggagaggtgttcaggatcttgaagtgacttctgtcttgctctcccataaccctgaagctgctgtagacattattgcagaaactgacaccacagtcaggatggccttgtccaggagcccatgtgcagtttgtagtgagcaaggatgagaaaatggtcttgaaaggggtgatggacagaacaggggcttttcaaaaatgtcacatcatcacccccagcatccgtgaatctgtcacatggtaagagaccttacagattaaatgaaggattatgagtttggaagattattgtagtttatccagatgggtccaacataatcacagaatcccttccttacaaatgagagagggaggtgggagagtcagagaaggaggaggagatgtggggatagatgcagaagacagagcggtgtcaagatgctgcactgctggctttgaagatggagaaagaggacacagccaaggatgcaggaggcctctaggaggtggaaaaggagaggaaacgcactctgccctggagcctccagaaagaacgcagccatgtgggcaccttggttcaagtttctgtgtcacttagcttgtgggaatttgtcacagcctcaacaggaacctacagaggagtcaccttgtgtgcaggtgggatccagggtcatttacagctaaatcctgatgtaaatattgcaggttgcttttcctacttcctatctcatggccaacaaccctggacaatggcagaacacccttggaaaccacggctctgtgctttagtggagggaccagcttgtttgtgggaaggtagcacctggtccaagtgaacctacatgagatcgttactctccccagggccctcagggaagggctgagaacagctggcccaggtgtgtggaggagctgcaggtgaggcagggctggaggggcctgtgggtccaggtagaggggcagacaggttgtcccatcgccatgggagcctgcacgagctttaggttggggaaccctgctcctctgacctggacgctcctgtgtggagaggaggcttgctcagtgagatccacgccagggggtaaattgggaactgatgggaaatgaggggctagagtcctgggtagtgcctgggaggaccttgctcaaggactgaattcttggtctgttcccaccttggttactctgacaacccctctctgtgtcccacggggataaagatctcctgagcagtggccattgggacagaggagaacctggtggccagagctaagcatccaggatcctggatttggggacaggcaagctcattgctgggggacagtgatagatacggcctccagggcctgggtgaagagagcaggagggctcaggacactggaggctgtgtggaggtcacacccacgatctgtaccacccatggatgctcctgcattgctcacctttgtgtggacatcagatggccccaacttttgcactcctgagacatctcatgcattcacagagggacccaggctggggctgtgcatggccttggtctctagggtagtgtgaggacagctgagcactcagctggctgggcaggactcctgcgaatcctgccctttcctgtgtagggtccaccccagcctgactcctaaccccctactcctgtctttccagggaagagagactggggttgagataaggtggagatatttttcctgtgtgacccaggagagaatggacatggagtttcaggtgagtttctgctaagttcccatgagcagaaaaagagccaatgagaggaagtttcccctttattcagatcctttccaggtgaccccgggtgggccataggcccattcactttccctgcaagcccccgcttcctgtggtgatgggaagccttcgccttggcccacccagagcccggggcagtctgttgaggtctctatatattcagcagggacccccatcccttcctgtccccaggcctgtgtctcctcaggactcagagctggttctctggctcaggctccatgtccttccccatccccagggctgggggcttcagggacgctccatcaacccacaggagcagctcccagaggaacctaagaagccacatctgctttgtggtcgatccagcagtaaatgtttgtgtcagagtgtagcaattccagtaaaaacagagaagaggtcttgacccctgaggccttctcagaacagggtctggcatctctctctgggcccacccagggctactctgggactgaacctggctgtgctcagggggttcctgctcccaggcccctccctcctctgctcaccacctcctgttattttcactgcagtttcctgaacttcagctcagccagatgccagtggggacagatcctgggtctccctggggcccaagggaccagaatatctgtggcccccactcacctcatagatgagagcagctgccctggtgctgggtaggggaatctgggcaggggagagaggggtgtcaggggacagggaaggattcctgctgtgtaggaattccagggctctcctcaggtgatggagggtcccagggtggggttagcacagggagtggatgatcctggccctgaacagaggcccagctcatggccagggcaggtctaaccttatccaagtcattctgggtagggtgggtttgtgctggggattgacagtccccctgccctgagcctgcacagctggggccccagtggaaatgggattgggaacggacagtcttacctaggagatggagctgtcagagggtccatggcctggggacagagacaaaagtgagcacgagagtgttaggatagctgggcccctcctgcaagagtgtgtgggggtcctcagttcttagagaattggggagagggagcctttctcaggttattttaggggtcaagtaagcaagtgaggttgaggaagtgacccatgacccagagcccggaggttagggctgacccggccagttggggtttcctgtgtgatgttttatgggatcctctttgcagccccagggatagggtcagaggcccctgggtgtaactggcaggagtggacaacttggggctggcttagtagttcccagccacacccagactgaagggacactcaccgggggtggaggctgggggctgctgctccctgaagtcactctgatcgctggccctaggaaaggtcagggttatttgtgaaggtgcaaggttaaaagtcacaaattggagttaaaataggggaccaggaaaggagcctatttccaagaggggtatggagacctcctttctttatggagttctgtggtaggaggggcccaggtgaggggagttgaggaaaggccttacaaagccacatctgtcctggccagaggggaaggactctcaggcagatgctgggccaggagaacattgatccagtgacacaggaaagggactgaggacccagggaaggaatcagaccaccaggggttgcctgagaggaagggtcaaggcaccagggggaaagcagggccaggcacatgtgcaggacactgaggggactgcatgcatcttggattctcctggaactcagtgtccctgctgtgaccagacactccactcagggctggagatgctgaaatgggacaatgatcttgtcttctgtctctgccctttggcaagagacataaacgacattccaggatatgccatattggggccccggttctcccttctcacagctcagtgtctgcagttaccatgtcagtcaaaggggtgctgaccccacccagcccgtccaggctgttccagtctccactatgtgataatgcccaggatcccccctcagatgccctctcactgggtggatggattcagtgaacagggggaggtaccaggtattgagcaccgctcccccctgctccaggcagctgtggctttgctgtgctaggaaactaggaccatgctcaggggcatggccttaattggactgaattcactgaggacaaagctgttgaggaagcagcccagggtcagcagctggtgaggaaggtgccatggaatgagagggaaggatccctggggagtcgggaggctggggagagcctggcactgaatacaagacagggtctccttccttctcgcctggggtcagcgtgaaggatgggagcagaatggggaaaagctgtggtacctgccagtttttcggaggagcaggaaacacacaagtgcagccaccagaagactcccaaccaggaccccgatcaggatgcctagagtgttgtcatctgctgaaagaagaaggcaaaggggatgaggtccaaatctgttccagggggaaccatgaggggccttgcagggcaggggcatggtcagggaggaaggaaatgccatggagcctgagtgtggtctgttgtgctgtcctcatagctggctcccttgctctccgtggttgcaccattttctgtgtcttaggcttgaattactgggatgcatcaactcctacattctcccacaggaagcctgcacctcatcctgctcctgtgttttttagtccctccttcctctcacatcactcctcttccccctgtttctttttttccatcccatggcagtcgtaaagggcaggcccttgctgccaactcaatgctgatgagcagggatgatgttcattgactgttttcaggggccttccacatggaaggcacagtgggaatcaatctacctgcagcttttctcaccctcccattgccttgagggagaagggtatgtgatattgtgaaatacgtatttggtgttcatcaccattgatatggttaggctctgtatccccacccaaatctcaccttgaattgtaataatccccatgtgttatgggagggaccttgtgggaggtaattgaatcatgagggtgggttttttccatcctgttcttgtgatagtgaataagtctcaggagatcagatggtttcataaagggaagcttccctacacatgtcctcttgcctgctgccatgtaagacatgcctttcaccttccatcatgattgtgagacctctccagccatgtggaattgtgaatcaattaaacctctttcttcatacattaccaagtctcaggtatgtcttcattagcagtgtgagaatggactaatacagtaaattggtaccagctagtggagtgctgctataaagatacctgaaaatgtggaagtgactttggaactgggtaacaggcagaggttggaacagtttggagggctcagaagaagacacaggaaaaaagtttgaaacttcctagagacttgttgaatggttttgattaaaacgctgatagtgatatggacaataaagtccaagctgaggtggtctcagacagagatgaggaacttcttgggaactggaacaaaggtgactcttgttatactctagaaaagagattggtggtattttgcccctgccctagagatctgcagaactttgaacttgagggaaatgatttagggcaactggtggaaaaaaaattctaagcagcaaagtgttcaagatgtgacttgggtactgttaaaaacactcagttttatgtatttacaaaggtatggtttggaattggaacttatgtttaaaagggaagcagagcataaaagtttggaaaatttgcagcctgatgatgcaatagaaaagaaaaatccattttctgaggagaaattcaagccagctgcagaaatgtgcataaacaatgaagagcaaaatgttaatccccaagacaatggcaaaaatgtctccagggcatgtcagagaccttcctggaagccccttccatcacaggactggaggcctaggaggaaaaaatgtttcctgggccaggcccagggctcccctgctgtgtgcggcctagagacttggtgccctgcatcccagccactccagccatggctaaagagggccaaggtacagctggggccatggcttcagagggtgcaagccccaaaccttggcagcttccatgtggtgttgagcctgcaggtgcacagaagtcaaggattgaggtttgggaaccttcgcctagatttcagaggatgtatgaaaatgcttggatgtccaggtgaaagtttgctgcagaagcagagccctcatggagaacctctgctagggaagtgttgaagggaaatgtggggttggaaccccgacacagagtccctactggggcactgcctaatggagctgtgagaagaagaccacaatcctccagaccccagaatggtagatccactaacagcttgcaccatgcacctagaaaagctgcagacactcaacgccagcctatgaaagcagccaggagtggggctgtaccctgcaaagccacaggggtggagcccaaggctatgggagttcagctcttgcatcagtgtgacctggatgtgagacatggatacaaaggagatcatttcagagcattaagatttggctgccctgctggattttgggcttgcatggggcctgtagcccctttgttttggccagtttctcccatttggaatgggtgtatttacccagtgcctgtacacccattatatctaggaagtaactaagcttgcttttgattttacaggcttataggtggaagggacttgccttgtctcagatgaaactttggacttggacttttgggttaatgctggaatgagttaagactttggggaactgttggaaggcatgattagttttgaaatgtgaggacatgagatttgggaggggtcgggtggaatgacatggtttggctcttcttcacccaaatatcaccttgaattttaataatccccacgtgttgggggaaggacccagtgggaggtaactgaatcatgggggtggattcttcccatgctgttctcatgatagtgaataagtctcacaagatctgatggttttagaaaggggagttcctctacacatgccctcttgcctgccgccatgtaagacatgccttttgccttctgccatgatttcaaggcctccccagctatgtggaactgtaagtcaattaaacctcatttttaaaaaaattacccagtctcaggtatgtctttatcagcagccaagaccagctcggtcgcggagatcctaacccagcagtgctagaggaattaaagacacacatagaaatatagaggtgtgaagtgggaaatcagggttctcacaggcttcagagctgagagccccaaacagagatttacccacatatttaataacagcaaaccagtcattagcattgtttctatagatattaaattaactaaaagtatcccttatgggaaaccaagggatgggccgaattaaaggaataggttgggctagttaactgcaacaggaacacgcccttaagatgcagattgctcatgctattgtttgtggcttaagaacgcctttaagcggttttccaccctgggtgggacaggtattccttgccctcattcctgtaaacccataaccttccagcttgggcattagggccattatgaacatgttacagtgctgcagagattttgtttatgaccagttttggggccagtttatggccagattttggggggcttgctcccaacagactaatacacccattttctggtatgtgactctaaagtccttagaatcttcaaagtgatgtctttttcaagctaataattgactgatgactggcagcccctaggcaacttcagaatgaggctggtcactgacccaggtaggattagagggttgggactttcagcctcacccctaatccctggggagggacctggagtttgaattaatcaccaatgaccaatgaatcaattaatggccaatgattgaatcaattaatggccaatgattaaatcaatcatatctatgtcatgaaccccaaaaggactgggtttgaagagctgaacccatggaagtttctggagtgtggtgcatctggggagggcatggaagctccacaccccttcccacatgccatgctctgtgcatctcttcatctgcatcctttgtaaagtcctttattacaaaccggtaagcctaagtatgtgtttccctgagtcctgagagctgtttgagcaaactaatccaacccaaacagggagtcatggaaacctcaatgtgaagccagtcataagaagctctggaggcccagacttgtgactggtgggaaggtggtggcaattttgtgggactgagccctctgctgatatgtccaggtagatagtgtcaggatggaattggaggacacctagctgatgtacggtgcagaactgattggctgctgggtgtgtgggagaaacccccccgcatcacatttggtcacagaagtgtgtctgtgttgatgattgttattgtggagtgagagcagaggaaaaacacagtttgagtttttccaaacagggtggaatcccatctgccaatttagaatctgaaacttatagtttcagtacttcaattaagattgaagtacttcaattcagtacttcaattaagattcagtacttcaattaagattcagtacttcaattaagattacagaactggtaagtgaaagtgatacaacaaaaatgtaaccaaagtctgctcaacttaacagctaataacaacaaagttcataaaaataataccagtcgatattgatagcactgattgagccctggctctgtgcatgaccttgttaagggctttaatcgcattaatctctgaataaatatcctcacaaccaccctgagatccaggtgtttgtaacaattctacagatgaggaaactgaggcccaggaggttgagtgtcttgcccaaggtcaaatacctggtacctattgtaaccaggatgataactggatgagtctaatccctgagttcttacccacattgctccccaggctctgaaggaatctcatccttctcattccgtgtatcattttacaccccccctccctcctaggaaaatatacaaggaaaggagtgagaggggccgagggtcactcacattttacagtcagcttgagggggtcgctcctgttggagctgactgggttggagacctcacactgatactccccagcgtcctcctgcctgatggggtctatggtgagcatatggttaaaccaggacagcttcatcctcttcgtgacctgcagacgctggttgttgaaaatccactggaaagaggttccagtgttatttgtgtggcaggtcaggaccacggagcccttctctgtgactgtggtgctgctggcttggatggagggctgagccactgactctgtggatagagtgaccaacagaaagtgtcttggggccatgctgcatcctcagagatctcagagtcaaatttagaacattctcctgtgaataaaggagaaagatgaaggacagggaggagcagagagaaccagagacacccatagcagcgagcagtagggactacagtgacctcagagaccccagggaccaggaggacccagctgcctcagaccaggaccagggagccctgaaaaccctcccacagatgagcggccccagagtcacatgagatgcaatacctggggtggctttaggagcaggcagtcagagaaatggaacatgggtctcagcccctaagggacaaggaagaggtgtggccagctcctcctaggatcctacatccaggacccagtctgtaaagaggttatgattattcctttcttttttcattaattccctccctccttcatcagagaactactgagtgtgtgtctcagttgggccttgtgcaggtacagggtgtagtgggaagagaaagctgagtcctttccttcatcctcccatgggagtgacatcaacaaatcaagaaattcatgatttcacgtccagtgagggaagaaatgtggatctgatgggagaggcttggacaatcctggcattgagtctgatagttgagacaggtgatttcgttctaagtaaaaactgactaattctccatttgcccgtcattcctcagaccagaatctccctctctgagctgaggatgcccaagaagaaaggagctgaaccaacatctggtcctggggtccacagatgccccacggtggtggccacgaccagattctgggctgcagacacacggtggtgtgacgttgagcactgacagcctgtgtgatgctgatgcaatttctctttaataaaatggggtaaatgtcaatggtccctggcttgccatcctctctgtaaattaacattaaaatatttacaattacctgacctaaagcttggcacagaatagctccaaataaacatcatctattattattttactccaaaaaaaaaaaaaaaagagttctctgggcctgattcctggtggagaaggagcggtccagagtgtcttttctctgctttccctcctcctgaggacagtgcacttcccgggacatcttttaagtttcccatccagtttaatggcctgggaagtttgtttgtctgtcctctccactctgactctcaggtgaaagatgaggctctgcccttgcccagatggggctctgggggctgagccctgcctggtgaccagctctaggaaccacggccctgggacagctggtaaatcgttgctcacaatcagccctgcccaggaagccacaacccagccctggcacaggctccccagggtcatctggagtcaggatcttgggacaggggcctggggcaggggcttgaagggctgagcttctctcagaggatcctcaggccaggccctgactgagtcctataagatctttctcaggtcatgtctatgaggaggaggccaagcggggttggactgagactgattttcccccgctgcatctcccgcatcagactatccttcttgctgtagggaatttccacggagtccggataagggaaaggaattctgatctgttatagtttgtctcccctgggtgtgtcctgcactaaatgcccaaaccccaacatgggacgtaatgcagagggggatgcaggcacagcccaggcctgacaatcctgcgtatgtgaagcagaactgacccccaacacccagaggcacggaggaatcactcaccgtatacacggagatggtgagatgcctgttcaatctgagaatttctgtatgtgacttgtagggtgtagtatcccgtgtcctctagggtgacgttctggaaatgcagatctccactgggtgatattgtctctcgaccgctgtatgcaggccctggagtcctaacgtgagtgtctattacatatgctgcgattagctggttgggctccaccgttttccctttgtaccagccatagctgtaaagattctcgggcagataaaccacagagagatgaacattctccccttcagcaacttcaaagggcgctgatgcaataaagagccaggcagtggtgggtgcgttccagaaagttaaaagtgaggctaggaaagggagagaatatcagtcaatatttgacctatgcattggcatggaaagacggggtcctgggtgcaggtctcttcacccctcagccttagagggtgtgtgtgtgtgtgtgtgtcctactgggtcaaagtcagcagcatgaccctcattccttcagtacctctgaccttggcatttccttgtgtgaaccctctttcccaggggtctgcatggttccctccccactgccttcagttcctactcacacaagggaatccctgggagacttctttcgtgaagcctcctctagagaccctgggtcttccctttctgacctttcccagctctgttccctccagggctcttgtcagcacctgacctcacattctagatctctttgggtgtctgtcttcccccccatgagattgtgagctctgtgagggcatggacttgagtgatgttagttgcaccccagtgcctgggacaggctgcagactcctgtggatgagttcatgagcgttcccagggccttccatatcctggggtttatttgctaatgtctgaggttggcagatgaagacagagtttcatgccctggtggtgtttttatttaaattgtcactgtgatatagttttactatcattttcaaaatgtagtggccactgacaatgaacttgaaaacatggaccaactgagattgttttgccccttggcaattccagttcacttagattttttggttctccttagacgctctctcccctgagtctctaacaaaagccctctgtctcctctcagagccccatcctccccaggagaccccagccagtctctgtgctccctcctcccacccactcccagggagtcctcccctcacctgtgagcaagagcccctgccaggggatgcattctctgtggggacaagctgaggggggccccatggtctctgctgcctgctctgtcctcctctgtggagaggagcttgggctccaggaacgctctagacagggttactgtgactgttgtctctgctgtccttccttcctctatgctgagcttcctctcaggcaggagcacttcccgtttatgggcaagggcggggctctgcctacaatgtctctctgtcccctcccctctcagtcctgcctcccttgtccctcctttctccttcctttttgcctatatttggttccctaggcaaaactttgagaagcaacgctgatggggtcctcataacaggacgacccactctccccagtactgacctctgctgtgttctggccttggttctgtcacagccggtagattatttccctttgtgacacacaaaaccagctgggccctgggtctcctcatgctctccagtgctccaggaaggcagaatgatgcccagcaggaaagtgacagaggtggctctgggggctagaaaggggctcactgggtgatggctgggaaggacccacccgctatcttcagtgtcaccagcctggcctctgacccagggacagagacccaggcctggaggtctcgggaggatccccagctcctaggtgtggagggaggtgtcctgtgtgtcctgggaagagaggactttgatggaaggaggtgggaggctctgggttctgctgtccttggtgaaggtttcagggggaccctctccatgtctggggtctgtgcccccagcttaactctcattctctttgcaaatacatatattttgtggatctgcagttgcctgaactgtctcatgtccctaaatctttgtatccctttttacagaaggtcaggaagggtgtgtacatgagtatgaggactatctgatcagggcgagtgtttgtttcccaaagatctctttagatatggtataatacataagataaatgtactgaattagcaattttaagtgtagaattaaatgatactaattctattcacaatgttgtacaaccatcaccataattttttaccagaaaatcttcattataccaaatggaaacttcatacttttaatcaataactccccacttccccctgccccacccactggtagcctctgatactatcaatctctgtgaatttgcctagtttacatgtctcatataataaggaattatatacgtgtattatttttttctggattatttctcttagggtaacacttttaagattcatccacgtcgtagcatatattacagcttctttcctatttatggctgagtaatatcccaatatatgtttatacctcaattttaattcattcatctcttaatggacatgtgggtggtttccacatttttgctattgtgaaaaccgctgcaatgaacttacacttggaagtatctgtttgggtttctgtgttcatttctttgggggtacatataggagtataaatatggggtcatgtggtagttctatgtttaagtttttgagaaacagccaaactgttttccagtttgctgtgctattttatattcccatcagcaatatacgagggttccattttctctacattcttgtaaacacttactatttaatattttttaaaacttatagccattctagtaggtgtgaagtgatagctcattgcagttttgattttcatttccctggtggctgatgaagttgagcattttttcatgtatttactgacaattttaatattttttagagaactatttattcaaatcatttgctgtttaaaaaaaatgggttatctttttattattcagttgtaatagttctttatatattttagatacaagtcccttatggggtacatgatttgcaaaatttttctcatattctgtgtcttctcactttcttcatggtgttctttgaagcacaaacatttttaactttgatgaagttcacttatctatttttaattttgttacttatgctcttgatgtcatattgaagaaaccattgcccaatccaagatcattaagttttactcctatatgttcttctaatggtttgataagttttgctattccatttaggtttttgaaacattttgagttaacttttgtatgggctgtgaggtaggggtctaactacactatctcgcatgtggttatccagttgttccagcacaatatgaagaggctaccattctttccccattgaggaatcttggcacccatgtcaaaaaccaatgggctgtaatggtgagggtttatttctggactcttgattctattccattgatctctatgtgcattcttgtgccagaagcacactgttttaatgattgtagtgttttagtaagttttcaaattaggaagtgagtcctccaatttttttttccagattgttttggccattctggggtgacttttaaaaaagatgtagttcaatggttctcaaagcaggagtggttcagctctccttttttggcagtctggagacctttttaggaccttaatctaagtagataaattattcccactttcttttctgagttgctatgttacagtgtatattgacacccatgaaataattgagagaccctggaagtgcttgcctacatagtgagggacaattagttccatgatcatgggcacagaagattttgttttgggaaacaattttgttggtggagttatattcatgcttactcttttatttgtcttcatagcctgcatctccttcagacttcatatctgtttattttcttgtttgtcctctggggtttgggtgttgggtgaccagtcagctggagctggaggaggtgcttagcaaggcagtgaccctggttgggaggagcagggctcagcagggtgaaagtagctgggccttgagtcaggagtggcatctggaaggcctgactgtaagggtcagaagggccagcaggtgggtgtcctaggcacaaacggtggctgctgctgtggactggaggaaggtaagaggccccgagtattccatgttcttactggctccccaactgaggattcctctcctgggctggtgctgtcctgcagcagggaggggttagacagggacggctgcacatcaggccggagtccatgtcatcctcttaggcactgtcactacagattgaggattctgttcataagccaagcctttgcacaaggaagggacccgggctctcaaggaagagcagctcctggtcagacctccatctccttctctctcattgcctgaggcctcaagcttggtctacctggcacaggggtctggatcctcctcccagggttggggtcttactgagctgggcacctgcaggtgggagaagatctggaggggccccatctgccttcaccagattgatgttgagggtccctgagtcctgcaccactatcaggtgctgagcaacttccagtgtcagtgacaaccaccccatggtggaagcagaaccacctcgtgagaaagcacctccaagcctcagtgcttgccatgtgtgggaatttgctggtttcagttgggggcatgttggtgggtggtcatgaattcagggccggattctatgctcacagtgcacatgctggatgtggtacagaccccaggcagggctcagtggggtggttttgggtgtgcacaggtatcttttctggaggagctggtggtgatttggctcccagaagttcctgagctctgcagactcaccaagcactcaatatttgagtgaacattgggcgagagagcagaaggtaagtgtcagggcatcggggttggtgcctctgggaagaggaggaacattctgggaacaaagctctcccccggcttacagggagcttcccatcgctcctgccttgaggatcagggaaactagggcctctgctcttccaggggctgcttgcaggcagtttgctctgggagggggtgacccaggagttgcctctcattttgcatttgagatttaaaaggagaagggacagtatatcttgccaggtcacaaaaattacaggcatcatattgactgaagggcactcctgtcatcactgcaatataccagaatggtcttttaaaaaaataagtgatttaggtttaccagcaactgtaatgcttgttttattcttctagttcaccgttaatgtcacttttgtagttttagcactggcaatgttgattttatgttgactctgatgattttaagctttcatttgttcacatagagatcatcttctttctgaatattaatgcattttttctctatttctactggttattcctgtacatagagtagagaatcacttttcccaaggaggtggaaagcttctgactaccaaaaaaaaaaaaaagtgtcaaaatgctttaaagtcagtaacttaaagatcaaatccaagagtgggcaacagattctgcccagggtctgaaaggtggagaggtgactggtgaggatgtttaaaagacctctcctctctactccctaaatgggggccatccagtgttcttgaggttcagagaaggcccagggctggggcagcagggcactgtcagctcccagctcccaggggccaggagtaagaccccaacactgtccagacactgattgcattcattttgggggagagtagattcttatttaaagaataatacaaaagtctacaaatatgaacataaacagaaattcctttgctacaattttccccttaataagacattccttcctaatgacatatgtgactgcattcatggctgagatgttttctaggatggtgagagcatcagagtggactatctggtgccttggggtcatgcattttcttcttccaatgtctacaggatcccccatgtcccactttgtagtgtaactcagtgtgtgtcattctggtttttgttgtatagatccttggaaagcccatgtcattcctgctgtgaggtacaggcagccaaatggcatcatctctaaacatgccttctcctggtacatcaaattatggaataaatgaaagccattttgacagatattgaagatataagtttctactcttcccacacatgcttctcccaagtgaaggattttactggtgaattgttattagagattagtgtggatcagtgactctgccaggggaaattttgccctctaggggacatttggcaaagtctggaaacattgttggttgtcagagctgggggagggagtcctgctggcattgagtgggtggatggtgctgaacaccctgcagttcacagagccccaccagtttgaccacccaaatgtcaatgctgaggagtggagagccctgctgtgccctcccgcagcttccctgaagcttcccctcacctgctcctcccatgtctccccaccacttccccacttcacccgcctccttacacctcagtcccctccacctgaactcaccccttagtccaaggccagccctgatctccgctctcctggtctccttgctccttagcaggaggcgcccactagatggcgcccttgcccttactggagctcaccgtctccctttccaccctgagacaaatgtggctgcttttactgccacaaccccagccctccacactctagatttgctcagggagcagctcctggacagacctcagggaccccagggaggagcctcactctggagattttgatggcatggtctttgaacttcactgttacccccagtcaggatccaggatgttgggagtgcatgattctgcccggtcccacttcagcaggaccccactgctgagttgtctgtggggacccgggcctctcatctccttcttgcattgcaggagagggatcttagcactgctttcacataaagtcagataatggaggagtgcaggtgagtttgggaaggtggacatgaagagaggttgtgtccctagaggtggcagcagtgagaggatgggcaggtgggaggaacacagcccatccagggttgccagccatattaggagcgacagcctttcctctaagcctccagcctttttcctgaaacattccagaactttccacttcagcacttcccactgaggctcctcaggtctgtccctgagctcccagctgagcctacctacccatctgaaatcctgagtcctgtgtcaccctcgttccccattattctgtgcagttctgtgggacgcccagctctcctgacacccccagtcttcagaatggccatcagcgctgtcgctgtggcaccagggtgactgccgcctggaggctgagtcctggcttcctgacagctgtggggcccgctctaggctcccttgtcctgatcattcatcacctccaggatgcacagcagctgggccagggggaggagcagggacaggtgtcagccaccctgtgtgtctgcaagtcaggctgggggtgtgggaggacgccaggaatgactgaactttctgatttagagggtgagagcttgcactgatggaatttgggatttaataggaaaagcatagcgttttcctattttgtaggcagggtggctggagtttggaatcatagattcccctgggatgtcactgtggacctcagtcccacccgttaggggcacagatttcagaatccacaccctggggcaaagcaggcatgggaggctccatcagcctggccagggctctctatttgtgcagctgctgcaaggagatgtgcactctgatgggaacagtgctccctcctccttggggggcagtatctagctccctgcagcccctctccctgcaggccctgccctctctgaacctcaccttccccaacccgccccccgcaatcccatctcagctgtaatcccaacactttctcatccattatgggtggactgcttgagcccaggggttcaagactatgctggctggacaatatagcgagttgttgtctctacaaaaagacaaaaattagctgtgcatggtggcatacacctgtagtcccagtcactcaggaggctgaggtgggaggattgcttgagctggggaggctgagttggcagtgagttgagattgtgccactgtatacttcagtgtaggtaacagagcgagaccctgtctcaaaaaataaaagtaaaaaaaaaaaaagaaatatggaatacattattgttaactctaatcaaccatgctatgcaatagtccaccagtaataccagtaatagccaataatgaattatctgaaaaagaatacaatttattcttagctatctactgctaaaatttttaagctatcttttatgatagctgaaacaaaagaagtaaatttaaccaaggaagtaaaagacctttataatgaaaactgtaaaacattgatgaaataaattgaaaaagacacacgcacaaatagaagatattccatgttcatgaattggaagaactgatattgctaaaatgtccttaccacccaaagtggtctacagattcaatgcaatttctgtcaaaacaccaatgatattcttcgaagaagtagaagatcctaaaattagaaaccacaaaaattcctaaaacctgcacaaaacaccctgagttgccaaagcaatcttaaacaaatagaacaaagctagtggcattacacttcctgacaatcaaagcatactgcaaagctatagtaaccaaatcagcatggtcctggcataaaaacaagcacatagatcaatgaaacagaataaaaatcccagaaataaacccatgcatctctagctaactgattttcagccaaggagccacatgcacacaatggggaaaggacagcctcttcaataagtggtgctggggaattggatattcatatgcagaagaatgaacctagaccctatccctcaccatgcacaaaaaattaactcaaaatgtattaaataaagacttaaatgtaagaactgaaactatgaaactactagaagaaaatatagggggaaaatccatgacattggtctaggcaaagagtttttggataaaatctcaacagcataagcaacaaaaccaaatataaacaaacgggatttcatcaaactaaaaagcttttatacagcaaagaaaaaaaaggccagcagagcaaagagacaacctacaaatgggaggagaatatatttgtaaatatatacatatatatttgtaaatatatacatctgataagaagataatatccaaaatatataagaaaattatgtttctgtatagttttatctgactgggatacagaggccacatccacagtcccatcctcaaaggccacttgttcccaaaatgtcaagcacatccctcaatgatccatcatcaacacctatgtctgtaggatgaagggtgaatcatgaagcactaaaaaggaagaaggaagccaatcccaaaacaaaatgatgcagggtctggaaagtccaaagcattttttttttttttttactgcatcttcctcctttcttctccacattcccaatcctcactattgattaacaaaacaaaaaaaactgggacccaccatcttccctactgtcaggagatctagcgagattgtttgagtcttagaccaaactttgccataagccaaatttctggctgactttacaatgatatgagctagcacagtctctttttctgccagtcaacttgtgctcggttttatttgcaaccaaatagaggtggtaaccaaatataggtgaccctaaaattagtcatcaggatgaaatcctaaaatgtgcaacaaactgggttgaattcaggattagtagcaacatctctgttgtgggcttgaaaagggggcacccttttatgcagtagcaaaattgctaaattgttgtttgctgagtctttggactctcatcccggattttctatgaccattcaaacagggctgcaatgaacatctatggttgtttagcttggcacacttctacatttctatatagtaatatctagaagtgcatttgctcaatcacaagatatgcacattttataattgactgctatcgaactaccttaaatagccttaatttgttctcaacattgtttaacagggtctgtttaatgtcctacgtccagcaaggacagtatcacttttcttaatatttttcaaattattggaccttaacaaatacttaatgtgcaattaattgattcctttgtattcccatgccttcttttatatgtttccttatagtacacaaaaccacattattgtttctttacttgtgtcattccaccctggaccattcctatctaaactataacattatgagagagagagagagagaaaacaatatgaaaatataaattgattaatcaaaaaaatttaaataggacaaatcaggaagacacaagagagattttaaaattattcagagaataccacaatagctgtaccaatatattttaaaacttagatgaaacggacaactatctcgataaatgtaaattaccaaaactgactcatgaaaaaatggatattatgaatagagcaataatcagtaaagcaattaaaaagacagttgataatttttatttactgacaacaataacaaaatttcaggtcctgatatttttatggtgaattttaacaaattttcaagctcctcctcaaccaattctcagaaggtttaaaactttaacaagaaaacactttctaacacattttcagaagctgttatagcatgataccaaaaccacacaagaaaattatagaccaatctcacttacaaatatacatgcaaaatcaaacaaaatcttagtgaaccaaattcagaattaataatagcaaacaagcaaaatatgttatcatacgtatggcttatatcaggaatgcaagtatgtttcaacatcagaaaatacttctccacattaacagactaaaggagaaaaacgcttgtttaattatctcaataggtttttagagaattttgaaaattttataaagttatgcgtattctgtaaaattgatgaaatccaaccttgatttatttttaaaaattgcctttcctatagaattataggtaaaggaaacacatgcatcctcacagagctacttcaaggctaagttacttcccataagtaacgtatcctgtaatgtgtgcttggcacatattcaatactaaacaaatatttgcaaatcctcaaaccacttctcgctcaaataacccacctttgtcttttgcctttatgttagggttgattttctcaattgtatcttggagatcctttggtgggtctttcagcaattaccctgaatttgcttttctgtttacaattttaattcctgggaactctttcttgttctctgactgcacccttttcatgagagttcagccatcaatcctccagaaccccaccccccccgcccccccaaaaagcaataaagatgtctaaaagcttccttctgggctttcgaatgatgtttaccccaggcatttgttctattcgttcatcacccattttccctacaacttgcctacacttgatatcagatttttatttattagtcacctatcttcttcattggcccattttcctattttgccactggttgttctcaaatgtgttatgattcctggttgtacagtcaagtggttgataatcttggatatacgataaagatttgctctgtagctgtgtgtaagcctatataaaagcttttgtatttttcttcttaaaaaagacaaaagatggttgggaagatccctccagttcaccagttcgaggctgcagtgagctatgatagcgccgctgctctagcctgtctgtctgtgaaaaacaaggggggcggggggcgggggggaagactggagatgtaaatctcccgcagggccctacccgtatccgcaacaggtctctaacaggaacagcctcaggcctgtgttggaacaaggtaggttacagaaatctggaagccagatctgtaacttcagggtaaggactggctctcagggctgatcccccgggctgggtgtcccagaggcacccgcccccgccccttccccaaggcaggccaggacaccttcactcctctccttaggctccccacccccttctcctccccactgtgcctcctggagtagcggtggcggtgccacaggggagcggggcggggcgggctctgagggcaagggggatgggccccgccggggtcactggcggccaccctggaaactcgacgcaggccggcccttctagtgaatcgtcccagccacagctggcctcccagccgcgcttggggcgcctcggggcgcgaatggtgcaggttggggagactcaccacgcaccgtcgggggtcggtccggttattcctcaccgctcggctccagtgggcgcgcgggcctctcctcctcagttcctgcgctgcagtccctccctcacccttcgcagcttgggaatccaactgtgtcattccgacggagcgccgtgaggacctccgagggtgttagcgccaagtgatctctgtccagcgctctgaatatccaagtaaaggagttcaatgaagggcgggtcaacggaggagaaaccgtgactctctcaagggagcccaaggcctccttgtctaattagtgacgcgccaatggatggaggctcttcccaccatctcttcccagcatccagtgacaccaccgccaagggacgggctcggcggaacctgcaggaaagaagcatcggctgagcctgactgcagcgctgtgaagagacaggggaggggatcagtagttggtcccgcgcccaccccctgtttccgcgaggggcggagttgactggccatgcaggcagagggcgaaatgtgaaattccactactcctaccgtttttccctgacccgatggggcggagtgtcgtcaggctaagttccctggcggtaaggtggggagattgaggcgcacacctgccgaacggtaacgcaggattagctaaggcgagctcaggacagaagcctcccgaggagcaggagggcaaaataataaataaataaataaataataaataactcactccttggtctttatttgcggcaggaattcagaaggtgaaagcggggccttaggatctttctgaccttttgggttttaagcaggaggtgtcagaaatgttaccacagggctagctggcttgtggccagcaagcgttcacaatgccctcgatttttcatccctctctgtgggttctttttttcattgtaaggcagaatttctacgattgctcacccactcagagaacctgagctggtttagaccaggtgagacaggctaggtttaccctggtgatgatgtgttgttgccatggcgatcctgcccagtaccagaggccctgcagattcagatgcttggtgcctgtgcttggctgaggggccaatgggtgaagctgccatctgcgggatgatgactgaagcctctaagtcagaatccgcccaggctgagccttagggcagctccatggagcctcggctggcctgggatagagagtccaccactgtgccagcccccagccactgcctaggtcctgtgctgagagccccttgtccagggaaatggcgtccagtggaaaagggaccacccccttgcccttcactcaaggcaggttggtgacaaccctgaagctaatccgttcctagaggagctgcttctgggtccgagttttctctgcagcagagcagctccctggatgggatctgttcaaagtccgcctttcacgcggaattttccgtccttgcaattttccacctccaccactaggggatcctctctgaccgcctcatgccggctctggcctctgagcaggggtttctcttctgcatgtgcgaccttgcgcatgcctagtggccttttgggacctagagctgctccacaccccgatggggttacagagtgcctcgcctccactccaccccaccagggttccttccctggctgggatgggatttcagaagcgccgaggaacagcccagacaggtgtgggagagtagccaaggcccctgtcccggggtggccaggacagcggtggcctcgcataggacctggctgggctgctgcaatcagtgtcctgccccttggagagcaacagtgaaaacaacaagactatcttcacccaccttaagaaagaacagaaccagtatccccaactctgctgtgtatcccaacccaattccattccccaccccactctcagtagccaatatgcaaaatattagaatactcttactgttattattttcaaccacactctgcatcctgaaaaaccatatatttcgttatgtgcttttaaacttcttgaaaatgaaatactgaggctgggcgcagtggctgacacctgtaatcccagcacttcgggaggcggaggcaggcggatcacgaggtcaggagatcgagaccatcctggctaacacagtgaaaccccatctctactaaaaatacaaaaaattagccgggcgtggtggcgggcgcctgtagtcccagctacttgggaggctgaggcaggagaacggcgtgaacccgggaggtggagcttgcactgagccgagatcgcgccactgcactccagcctgggcgacagcgccagactctgtctccaaaaaaaaaaagaaaaaagaaatactgaattttcaaatacttgctttttttttcggtcaaaattatgttctcaaatttcactcctgtagatgtgcgtggctggctgtagtttttgcatttttattattaggtattctcctgttgcattaatatgccacattttatttctctcatgtttttggtgaccacttggggtgttttttggttttgtatttttgctgtatacatgctgccatggtggacatacctctttatacatatttcctgttgtatgcagacacaattttaggatgtgacatcttcagcttttctattgtgtcgtgtgtcttttccttcgtgctttgtgttatttacatattctggacacagattctttgtcaactgtatgtgctgcacatctctttcccagtttgtgtcttcttcttcttttttttttcttaaaaaaaactttctttatagtgttttttttttctttctttctttgttttgttttgtttttttgagatggagtcttgctctgtcacctaggctgaagtgcactggccgatctcggctcactgcaacctccgtctcctgggttcaagtgattctcctgcctcagcttcccaagtagctgggattacaggtgcctgtcaccacacccagctaatttttgtatttttagtacagatggggtttcaccatgtttgtcaggctggtctcgaactcctgacctcaggtgatccaccctctttggcctcccaaagtgttgggattacaggcgtgagccacagcacctggcctgtgttctttcttaagtagatgttacttttaatataatagaatgtatcatattttgcttttatattagtactttttctatctaattcaaacacatccccaagggtctttgtgtgtagactgaccaatttctcaagaatcatgaatgaatactgcttctctttccccaatttatctgtaatgctacctttattataaagtttctatgcatgtgtagaaatagttcctgatttttcactctgtgccaccagcataccaatagcacgctgtcttaaatattaaatagcagagctttatgagacaacttgatgtgcagtaggcaattgcccccttgttactcttcttcagggttctttgttgtaccacatgaattttagaattggcttgtccagctaaaagacaactgcaaggattttatttggaagttcataattctatacataatttggggaaagtattttcataataccaagtcttcctattaatgaacacagactctctctctctctcccccacccccacctgtttagttatttatatctttatggtctgttagttattgtttattgtctttcaaccaggtttcatgtttttctacatagaggccttgcatgtgaaagtctttcttcctagcttgctattacaaattttttttaattgcactttttgggtacagtggcttgtactgtaatccccgatacctgggaggctgaggcagatggattgcttgagtccagaagttcaagaccagcctgggcaacataatgaggtccctgtctcaaaaagtttgttttaaaaattgcatttgctgttattcaacaaatgtcattgtgtctcatatatggatttttatatctgataaccttgttcaacaatcttttgattctaacaatatatcagattcttttgagttttccatatagacaataatgtcatctgtaaattataattgtttcttctttgttatttcttggaccttttattttatatttttgtcttgctgcaaggcaatatccctctatatattgtggggtcttttttctcataaagtggggatggtgaacacccttgtcttgctctctgattgtataaagcatgctttctgtagcattttgtagacgctcttttttagattgaggtaattcacttttatttctggtttactgagtttttagcataaattcaggctgaatttgagctaaagctttttctggagacatcatttgaaaaattcatatgatttactttctttaagtcaccaaagttatgatttacattgaactgagtttctactgtttaactgtattcttgggagaaaacccacttgtcactgaacaatatctgttttatttactgctgtcttgtgtctaaattttcttttaggattttttgtatatgctcagattagcctgttattctcctttctgtatttttttctggtttgggggtcaaagttataatagcctcacaataagagctaagaaaccagccctaatggaggccggggcaggaggtttggagttcaagaccagtctgggcaaaatagtgagacccccatctctatgaaaaatagaaattagccaggcatggcagtgagtacctgtagtcctaggtacttgggagggtgaggcaggaggattgcttgagcctaggaatttgaggctgcagcgaactatgattgtgccactgtactccagcctggatgacagagcgagaccctgtctcaaaagaaaaaaaaagaagaaataaaaaggaaaagataaaagagctaagcatctgtttccttttttccattttctgggagagtatgtgtaagactgtaattaactgtttcttgaataatgggagaactctgtaaaataatctggctttggtgttacctgtattggaaggatgaaaaataccaattcagtttcattattggttgatagggctactcatgctttttgttttgttttgttttgttttgtttttgagaggaagtctctctgtattgccctgttgtccaggctgagatgcaacgttgttcacaggcctgatcctggctcactacagcttctaacttccgatctcaatagatcctcccgcctcagccttcccagtagctaggactacaagcatgcagcatcacatccagcctcttttcctgcctgacccagttctggtttcctttagttttctaggtgttcatccattttatctaatgtttaatgcatttggcataagggtgctcagtgtcctttcattgtctgttgtctgtaactgttgccattttcattcctatttatgagtactggcgtcttctctcactttttcttaataatcctgctggaactttgctttttaaagaacatcttttgacttgttgattcttttttcatacatattaactattttcttattttttgcctttatatttatttcttttcctgtttgaaacattgctcttttcttactataaaaatgggtaagtagctcatgaattaccacctcttttaaaaatcttttctactgtaagcattttagcagtttacatttgcccacaagtaccacttcagctacaccctatgtgcttttacataaagtcttcatttttggtaagacatattctcaaattttaattatcacttgtttttaaatccatgatgttttatttgaaatgttgtttctaaagatacattttctggttatacttttattcttctaatttagcacagtggccacaaaacatggtctgtgcagtgcatacaatcgatgagtaatttctgagctgtagtatttggcataatatatggcaaaatttcctaagttttccatgtgtgctttaaaaaacttccagtaaaatacataaatctgttagatcaagcttctcacattgttcaaatagtctatatgtttactgattcatttgactgcttgatttatcaattacaggtaggaatgtattcaaatctcctattaaagtgtgacactcaagtggctttttaaagacagagatgccaaaccaatgaatacatgattttccccaaagcctgcacaaattctctaatgaaattttaccatgaaagtttgtttaattaaggcttactaaagcagtatgttgtcttttactttttaaacagagaatatatattttaatacatcgtttaagtttatgattaattatctattactgaggataagaatctttgcctgtgctcattcagcatttgcacttcatttatgatctgccttctcatagcttctgttaatttttatactagagacatttatttgtttgtataaatgttgaaggtttttttttgttgttgttgtttttgagtcagagcctcgctctgtcacccaggctggagtgcagtggcatgatctcggctcactgcagcctccatctcctgggttaaagtgattctcctgcctcagcctccagagtagctgggactacaggcatgtgccaccaagcaaggctaatattttgtatttttagtagagatggggtttcgtcctgttagccagggtggtctcgatctcctgacctcatgatctacctgcctcggcctcccaaagtgctaggattacaggtgtgagccaccgtgcccagctgggttttttatattataaggagatgtaatagatagatagatgtttcaaagatagtcaaatgtttttaaaatttaaaacacttttttacaggttgactttcaccatttaatttcatctatgtgttttgccttagagaaattttaaatgctatgtagatctcatgacttataattatgaagcattttgttttctgttttccacgaaacttagcttaactttgagcatataatagttgtaaaggtaggagagtaacactgaaaaaaggaattgcataaaaatggcacattttctgtagagttgtttatcgcctgaaaataggccccatttcatggaagtaagatgatcaggctcaggtccccagacgaaactcttggcatggtttttggagatagtccagggctcagtactggctctatcatttgctacttctcccaaagtaaccaatatctcatccaccctgagcccatttccatatctctaacatgaggataatagcatctaccttacacaccaagtagagggatcaaatgtaggaactaaatcaaagtaccagcactgaataacctacatcctcccacttcccaaaaggaagagagatgtatcccctgttgacaaacgagaccattttgcaggagagaaaggaaatgccagttcacttgcaatgtaaacatgctctctctttttagggatgtccagggacctgagagagaacccatgcttaccaaagagtttctagttccagacacacaggactcgaagggtgacaagtatggttttcagggtccctgaatccacccagtcctcacagaaactcctaaaagctgtcgattgacagcgttgagttcacagctctggtcctcacatgctgatactgcttgtgatatcgaacccgacaggaccccacatcacaattgatttaccaactacaatataatacctcctgaatctccaaattggctcacccaggaacaaaggcttggggtaaaactggattaggagatataagctctgaattttctgagggtgagacacacaaggattctaagtgacacgccacagagtaacgggtctgtgactggaggacccacagatttgtcttactggagacaccacatgcacacaaactccatccttagctgtggaaacaagggtcttttgctatcttagccgaattctgggagtaatttttggaggggaggagatctttgggattgcctctttcaggccctttacaaaaatacctacttcttaaatggtaaagcttacactaaactgaaaaaattacatccttggctttttatgaagtaggtgttggattgaatcactactggaagaagtatggcatcgcaaattctaagcagtggtcaaaggatggatctgttaaattagaaaaatctctaaatttataaaaagattttagattcctttattctaaacaattgacctatttgtactcatgggacaatcaaatttcaaaggagatatgtaacgatttcatggcttgcattaaaaatccttctgataaaattaaagataaaaaatctgaccccctgccaaaaaaatcttttgaagttcatactgcctgctttcaatattctgtgggattcacaatgaaaggtgccttatattgtggcctagcttcaagtttatgccttcgccaccatggcctgggttcaattcccagtcagggccccagcgcctttggtttaatgtttgcgtggcatttgacttttttacctatttagtattggtgagattacctttggtaaaaaaaagtttaaagagtggaaatcgcaattctttgtgttggctaaaatctgattataagagatctggaaggttttatttttctttttcaaagagctctatggtcagaagtcggcttcatgaaaagctaatatttaattatatgtacatacagtctttctggattttctcttttgcctcctgttttgaaaaatatttggatttgagtgaaactccgttttagaaattaattgcttggtacaatatacccatgtaactaccctgcacatgtaccccctgaatctataataagagttgaaattttgacaaaataaaattagattttgaattaaaacaaataggtgcttggttcctctgctcacttctttttaaaaggaattcctctcccatgtacttcttcttttcccttctttaccttccttttggcatctttggtatcacatgaagggatctagagggaattttaagtgactctgaaattccttgagaaatacacaaaaagatcccactcaccccttttgggggtctcctgttctccttgtggagtccagagtcagggacaggctcctccaggtctgcagctctgctctcttttatttcatcttggctgattgctttggttttgtgagtaccaggcattactttgtactgtgagagacacgtcctttgtgagtgcaacggctgctgggtcactggtgagggctgcagtttggagatggctgagagccgttgcaataaatggttgtgattgcagggggctccttgtttctttgcaagtttagatgagaaaggtgcagtttggacacagtttaaaggctgtgaaaacaccaccaatgaatatgatttcctttggggatggtctgattaaaagtgggctgattgttgctgtgctactagccttgaagacatgtttctacagcattgtgcagtgtggaaaaattgtgtggcttggtcttgtggcatgtcccttcttttagagacctcagattcaatgtgaaattcgggatttttgattttcaaagatctagatgccctgccttccagatgtgcctactcttcacatattttaaaattagatcctataaactgcaaatactttgttggcttctgtgagatcagaggtccagttagaaaaggaagacagtttgttaaaattaaaaactatttatctaatctaactagattggcctccaaatatgactttctgacattcagctggttactctgaaaagatttctaaatctcttgaggctcatctatatgtttccttgcaaagaaaaaaaaaaaaaaaaaaaagcaagcccaagcactagtaagaaaaagatttgcaatgtttcatgaaaggagtagatgagtgaagcatttatttgtagatactgggttggatacctgtgcaaagaagaagaggtcaataataaaaattgccaggggatttcttggaacttaacaagctgaattaaatatagaaatgtcaggaaatcaaggcaggaaatactcacttgtggttaggcagacagggcagggttctgagcttgagatggagcaaacagttgtggtgggtgaagttcacatgctttagagctcagctgtcctagtaaagaagcctaagagtctctaaagctcttatgagaagatggattttttttgcctagattaaaaggttaaagaattgctttaagttggataaaataaagctaaatgtttaagcaagttgtgaaaggtttatgaaaaaattaattaaaatatttttgtgtgtaaacatattgactaaagttgaaggggtataattcagcatttctgtaaattgagcattgaaataaaaacacaatgggtttctcttagagcactaacctgctctttaacaaaaattgtaaagggttatagaaagtctataaaaatgttaccttatggtcaaacattaaaattgggtaaatatgtctatcaggttttattaagaattaggtttaacattaatagtacactaatgtaaaggtgaaatttggcttatttggtacaaaaatcatacaggaagcattgtgaaatataaaatgatttttagctttctttgggctatatttctataaatatgttattgatgagggttccaaagttatgggagactcctataattctgctatatctcagtgtacattatcagtcataattataattgtcatgttaaattattgtgggccacagaggtaacagatttccttgtcaattgtgtctttgactatgactaccctaaaacgttcagtcacccatatacacatgttaccttgttttggccctctttagaaggtaattttataatcagctataaagccctaacaggtgctcttaaatgcaaattttgataactttggagattgtgacatcagaagagaggaaaaatgttcgggacacttggagagctaaaatgttcattgatatcaagcaggacaggaattaactgcatgaagtgaactaataggaggctgaagtgatctttttgactttttgcttaaaacgttgctgatcctttgttttgcttttcagagtcaaggcaaattttcttttgagctattgacagcttttaacgattaatcaaaatatactcctatgaacaccatttggagcattatttgtttctctctacccgatttccccagaatttggaaactatttgtgggtattcttaatttatggcaatatagttatttgcataagtgcaataagaatgtgttttctttggtaacaggacacaatttgaaaaactggttattttaccaaggttttgaccagaatgctgtgctttcctttaaggaatcaaacttgacttgtggagctaataaagcctttggaaaactgaccttatatcctgtgaacacagtccctgtacagggttactgatctgtgggaagaaaagaatgtcacattctgacaggtcaggaatcccaagttatcttgaaacttcaagaggacaggaattcacccaaccatatgtatttgatggtagaaatccatggcaggggctcagctttaaaaagtcttatctcagattccttctataaaacaaagtcccattaaaaccaattttaaaagcctatgtgaaaaataattattcttgctgcacctcgtacaaataaagtggcaaagcataataaagcaaattggtcctgtcgtaatttgtctttagtaaaaacgggaaactggggtcgggtgcagtggctcactcctgtaatcccagcactttgggaggctgaggtgggcagatcatctgaggtcaggagttcaagaccagcctggccaacatggtgaaaccccatctctacaaaaatacaaaaatgagccgggcatgatggcgggtgcctgtaatcccagctactcaaggggctgaggcagggaagcggaggttacagtgagtcaagatcgtgccacttcacgacagcctgggtgacagagcaagactccatctcaacaacaacaacaaaaaagggtaactggagagagggaagttatgtttcaaaaacttttggaaactatagtacacctgtttttaaattctagtctggcattcagtttttattattttctacagtttgggttaaattcgtatttctctggctacaagtctcctaaataatcttttcatttgtttcctttttctttccctttttccccatttttcttaattggaaatcactgaaacctaagctgtgctttcttaaagccctgtgaactgaagactagacaaccgaaacttctgaaggaagtagcagcaacctatttatatgtgttgctgttgcctactattatgttttagcaggtgctgcctctacacccccgaaacagagagtgctactgggaacaaatcgactttttccactccagtgctgcattcggtgccccataacgatgaccccctctcagcaggaagtagccagaaagattacaatgctccatctccctatgattcttgtgataaataaatatacaagcatgatagaaatcatgcgcaaattgacagtggggattgtggcaggccagatttcactaatggaggtccccatcacaactacttcagtactgactgagtggttaagttcagtatcaaaagctgaaagtgccagcgcctttctacaaaggctagaatgtaacaaaagcccaccaagggttttacctaggcctttcctgggccttacagcatgacaaaacaaagaaggaattcttaaccagacctgtttaggattaaacaaatttaattgggggtctgaagaaactcgccaggcctccacaaacaagttcattgggggtctaaaggaaccccccccaaacctctgtgattgagcaggagacaaggtcagggtaattgccccagcacctggactcatttagatttaagtaaatgtactgaggctccagagaaaggtctccaagacttagactagagttacagattaaaagaagttaatcacttatatctttagataaatgcacactgacacgtagacatacatcttagaaaatatataagctctggaaaaccttgtaatttacagttggtctggagatattttctgggccttctctctgtaaccggttccagaaataaaaaactctcttcctccccagtttatctgcatctcgttattgggccgtgagaaatagcagccagaccctgagtttggtctgggaacacactggctgggcttcctgcctggcggtagagcttcactgtcctccttcccagccaaaatgtggcccttgaaggcttcctccccaactgaccggttttgggttctaggtactcagggaacaccgtcttcaaggaggccattttcatactgttcctggtttgatttttctgaaattaggaaatgccccttgaggcatccaggattgtctttatttcccctgaagcttcccctcctgaagaaaaaagttctcaaacaccctcaggactcaaaccccaagttcaccctgtgaaacattcccatttcctaaacccaggcaggctcatggccctcagcctctcagaccccatggaaacctcctcccccacttcacgggttctctccatattgagagcctcccctcctcggcacacaacccagagactcaccccaacatgtgtagcaaatcaccctggaaacaatcatggctgaacgtggtagcccatgcctgtaatcccagcactttgggaggcccaggaggtggatcacctgaggtcgggagttcgagaccagcgaggccaacatggtgaaacctcgactctactaaaaatacaaagttcactgggcattgtggtgtgtacctgtaatctcaactactcaggaggctgaggcaggagaatcacttaaacctgggagacagagattgcagagagccaagatcgcaccattacactccagcctgggcaagaagagtgaaactacatctaaaaaaaaaaaaaaaaaaaggaaaaggaaaagaaaaaaaaaatcatgaggcaacattgcatttaacaatattttatttatcaaaagacacttgtctttctcaggtaagtgaaggtctagagatgaaacgagtcccgatgtaaattgccccatgggcattgctgagatcacaagatcatcactgcagcatgcagcacaatagtaaatttctcaggatggaagttcaacaatccaaaaggtagtattttttttcatgatgctcagtccatcatacgaaataaaaataaattccttttcatgatcatccattcagtagaaaaaatgatagtaaatttgttctcatgaagatttttaccgtaacatataggatttatcgttattattattattctttgttttttgtttttttgaagcggagtctcactctgttacccagtctggagtgcagtcgtgcgatctgggcacactattaacctccacctccagggttcaagcatttctcctgcctcagcttcccgagtagctgggattacaggcatgcgccaccacacccggctaattttcgtatttttactagagatggggtttcaccgcattggtcgagctggatttgagctccggacctcgggtcatccgcccatctcagcctcccaaagtgctgggattacaggcgtgagccaccgcgcccggcctcaatttatcattattcacgcatccacaaactgggttcttatattttgtacgtgattttttccattgaggagagatatctgtgcatattcatgctgctcatatttcatccacaaactcggttcatatttcatccacaaacataattttttccgttgagaagagatacttgtacatatttatgctgttcaaattcacatttcatcattcttttacaagaaatagataatgtattttaaggttttccagtggtattacagatattttactgggtgtatagatagaaattaaaccaaacttctttgttctggccgccagtcatgcatcctgttttcaacatagttcacatacaactggttgtgtaaaaatgaaattattttgtttagtacaatcatcaacagttggttgattagatttttaattatcaagttaatcattgtcattatgcttctcatcgcactcgtcattaattgctgtgggaggaaatttgttatgttccctatgagagggtgtatcacaaattcaaataagaattcaacgacaatggactgtataaaggaaataagcaagtccatggaaaacatatttttttccggaaaggattaaaatatttttaaaaaggaattaaaaaaaaattgggcacggtggcaaatgcctagagtcccagctgctcaggagatggagacagaaggattgcttgagcccaggaataagttggaggctgtagtgaacagtgattccaccactgtactccagccagggcaatagagggaaaccctctttctaaaaagacaaaaagaaacaaaacaaaacaaaaaaacaccacatcaaaaaacccaacaacaaaatgaaaaaccaaataacagcaatacaattggagctattcgatccaaagaagtaaatgaaacataaagcaaataaaagagaaaagctaatacctgtgtcctgcaggactcagtccaagttctgctctgactccctcctggtgagccaccccttaaaaagtcacttggggcggggttactttgacagacagtcttctgtcaaagagggaggcggtaaatagcacttttttttttttaatttaacgcctttccaacaaattagcggctatgttgtctaagagtgcaaatgtcagaggtgggtacaggcagcaagaccctccccacaggggcagcagaaggaggaatgactaagggaacaagactttagtgtgctcaactacacaggacaggaaacagatgctttttacaaaagctggtggacttgaaggcagaatattttcaagttcctgtaactgcgaactatgacctgtagcctgtgagagtgactttctgtggcaaaggagcttttgtgaatgtgaggaagttaattatcttaacagtgggaggttctcccggcttatctagctagaccctcgtgaaatcccaagtgtccttaggaaggggaagcagagagagatttgagtccagaagaggaagaaggtgatgtgaggcccagtaggggaacaaagggcgatggcatgtaaacacttagcccccagaagtgggagagggctggggttcatcacaccagaatccctaacaatcagccttattttaattacccttgaaatggaaggaggccttagagagccagaggcttggaggggcaccctctgctgcatacacagatcccaactgctgtgggctccaaataattgcaccagggaaatcacaaattatcaaaaataaaggatgtaaagcttttaaaaaatattaaaagcccaacaaataaaaaaagttctaaatctataaaattgacctcagtctgtatatttagatgagtcatgtgtatatagcgtttcacttcaaaatatatgataaatctctcattcattggcttaaaaataaacacttcaatcaagtctttatcagaaaaattgaaacgttaactcaattgccttttagttcatgtgactttacaaaacttaaaacaataaagtcagttttaaaaattattagtaaagtaaaagaaaaatatcttcacaatgtagacattttgtccacatgagacatgtgaaatattgccattactaaatatttgcaggtcaaaaactgtttccaaaacattttaaataatcatctggcctgtctgttttagagcattcaattctagctgaggtctggggacatgtgaaaggagccacggcccgactccgtgctgggaagagtcagacattttccacagctctgtcctttgctgtgggctctgcaactcctaccaattaaaattgcttacgtttttgttttatttttactaaagaggggttcctaaaagctaacattatactgagtatatgtaactaaaactactaagaaaacaatttcacaattatacaaatgtgccaagtaaatgaaaaaataaactgtattttaataaaggttataaaaagaaaaacatatagtggtgtgaggactgtctcaggtcttcactgagcaagggatcatgacattctatggcggacagctgaccttggctttctgctcctcttgattatgtctactaagtgacatacttactctttttccacctgtcttgcctctaagggtaacaggttttatgagatccctcctagtgctttgcaggtcagcctccctttgctgcattccaattttactgcctataccctccagctggcttttgatgacaaaagtcctggtcccagccattctcagattctgtcatccccgtgggcactatggagctcagcactatgggaggttccccaaaaatctcgttttctatgaggaatggccaccacctgcatctcagtgatgctagtgacccctttcctactcctgtgctcactggtcctcatgaagatcctggttggtctgtagccccctatttttcctattaaagagaaattacagtaagacccatttgtgtgcaaaatcaattttaggcttattacacttggcctgataatttgcataaaatgcagcaagaattcatcggccatataggctacttttgagttaattttcctgggtttttacctaaaaatatactattttggttagagtcttgtgaaaataaccaatgtgttcaattgttttattttaaaaggctcttactgaacactataaatatgtataagttgaatatacaaactatattgtcataaaatcacaacccaaaatgtggagaacgcagagggaaaggtaaatttgctcgcaaaaacatacttcacccaaataactggaaaaaaaaaaagactttcatgacccttctttaaccagagcagcagctttcaaacaaggtgtttgccttggaaatgccattcacaagccaaacggcccttgagagctgtctgtcaggcactgtagaatctagcagctcctcacagagttagaaatagtttcaggaaagagattccctgcttttagtaactgcactttatattcccagatagcgagattgtatgtaaaccatttttatcttattctggaactcttttgggtactttttttttttttttttaaatgatggagtctggctctgttgctcaggctggggtgtagtggtgcgatttcagggtatgagaaaatgcagctggacctggctctttccaggaagaccctcacagccaaggagtccaaagcctggggttttcatctaattccagtgtgactggggtaggagcagctttggtgctgggtgtgtgtgtgtgtgtgtgtgtgtgtgtgtgtgtctatgcctgtgtctgtttagggtgttaggctcgtggttgtctagatacaaatgtcccagggctcaggagccccagggttatgtcaggggcaccagatgaaggtgtcaacagaagttagggcacaagggacaaaggtgagagcaaggttagattcatttaggtgcaagaaatcatagagggaggagggagaggaagccctcctgctaccaccgaggaagaagcgcagcttaaggcagaaagcctgtccggagaggaagtgagtttgagggcagggctctctgggtaaagtacggtctgggacaccagcctgggggaagggtacagaatgcagagtggcctggcgtggggactaagaacagaggagagcagctttcactgggagggtcagtgttttcagtgtccagcactgagcaaggtgagatttgggcagcttgctgtgaaataaggtcaggctctggcattgtccccattgcgtgtgtgtgtgaggggcactttgggagagtgaactctccacctccatcctctcatacgtccttcaaccgagcttgccagttaccctgattccaaggagatctatttattgttgacaatactggatcctagcagaggctgggtaggagcctgggcacaagcaagtggaggagggggcctgggcctgaaagacctgggaggtttgagagaggacacagcccacagaatggagcagatggggtagagtcggcaagcattcagggctcctagtaagttggacaatggagaccctgaaagatccagtaaaacggggagaacaaacaggtccccaactcacatccttgcagtgcctggagcttcagactccagacaggtggggaaggaaaattgagggatgtgaacatgttggagaatgtcgtgccctgaagaatgaagaaaaggggggtgaggaatgagagcaggaacggcttccagtgcctggtgcccaggagaactcagaaaatgggtgtggtggagaggaatcgaggaaccggaagtggtggaagtgtgcagggcccctccgagatcactgtgactgccaggcgtcctccctggctggagagcttcactgtcctccttcccagccaaaatgtgtcccttgaaagcttcctccccaatggactggttctgggtcctatatatttgaaggggtggcctgcctctccacacctgtgggtatttctagttgggtgggaggagagacagagaaaagaaataagacacagagacaaagtataaagaaacaacagtgggtccaggggaccagcactcagcacaccaagggcctgcaccggcaccggcctctgagtttcctcagtttttattgattattattttcattatttcagcaaaaaggaatgtagtaggagagcagggtgataataaggagaaggtcaatgaaaaacatgtgagcaaaagaatctatatcataattaagttcaagggaaagtactatgcctggacgtgcactcaggccagatttatgtttctctccacccaaacatctcagtggagtaaagaataacaaggcagtattactgcaaacatgtctcacctcccgccacagggcagcttttctcctatctcagagttgaacaaatgtacaattgggttttacaccgagacattcagttctgaggggcaagcaggagacagtggccttcctccatctcgactgcaagaggctttcctcttttactaatccacctcagcacagaccctttatgggtgttgggctgggggacagtcaggtccttctcatcccatgaggccatatttcagactatcacatggggagaaaccttggacaataccccgctttcaagggcagaggtccctgcggctttccacagtgtattgtgcccctggtttattgagactagagaatggcaatgacctttaccaagtatactgcttgtaaatattttgttaacaaggcacatcctgcacagccctaggtcccttaaaccttgatttcatacaacacatgtttttgtgagctccaagttgggtcaaagtggctgggtcaaagtggctggggcaaagctacaaattaacaacatctcagcaaagccattgttcaaagtacaggtctttttcaaaatggagtctcttatgtctttcctttctacatggacacagtgacagtctgatctctctttcctttccctacatatattcatggaccacagtcttcaaggagtccatttcctcactgtttttggtttgatttctctgaaattaggaaatgccccattgaggcacccaggattgtctttacttcccccagagcttccactcctgaggcaggagcttctcaaacaccccccaagactcaacacctaatttcaccctctgaaaccttcccatttcttaaatccaggcagggtcatggtccttagcccctcagatgctgtggagaccttctttccctttcatacattctctcaagattaaaagccacccctcctcagcacacaccccagagactcaccccaacatgcattgcaaatcaccctggaaacagtcataagaccacactcatttaataatattttatttatcaaaagacactctttctcaggtaagtgaagttctggagaggaaaagaggagtcctgatgtaaattgccctgcaggccttgctgagatcacaaggagattgttactgcagcttgtagcacaatagtaaatttcttctctggatggaagttcaacaatccagatcgtagtatattccttttcattatgctcagtccagcaaatgtgatgataacaaattccttttcatgatcatccattcagcagagaaaatgtttgtaaatgtgttttcatgaagatgtttaccataacatacaggatttaccattatcaatgcatccacaaactctgctgttgttttttatacataattttttccatcgagaagtgatagttgtacatattcatgctgttcatatttcaaccacaaactctgctggtttttttatacgtaattttttccattgagaagtgatacttgtacatatttgtgctgttcatatttcatgtttcatcatccttttacaataaataggttatattgtattttaagtttttctaactgtagtgcagaaattgtactgggtgtatacatagatatcaaaccaaatttacttgttctggctgataatgcatcatttatttcatagattatgtatttctttgacacatttcacgtacaactaattgcataaaaatgaattttcttttagtatagacatcagcatgtgcttaattcggaatttaattgttgagttaaacatcgtcattgccttttccgttgttattaattgctctggtgggaattttgttatctcatacataagacagtgtgccacaatatctcttaaaatttcaatggcaataaactttatatttaaaaacagggaatctatggaaaacacatttttttctaaaggattaaaatatttttttaaaataattttctaaaaagttaggcacggtagcaaacgtctagagtcccagctactcaggaggctgagacaggaggattgcttaagcctacgagttgggggctgcagtgaactgtgattgcaccactacattccagccagggcaatagaagttaaccctttttctaaaaaaaaaaaaaaaagaaagaaagaaagaaaaaaagcaacaacaccaaaacctcaccaacaaaatggtaaagaaaaaaaaaacagcaatacaatgtaagctatttgatccaaagaagtcaatgaaatttaaaacaaatgaaagggaaaaagtaatacttgagtcctgcaggactcagtccaagttctgctgtgcctccctcacggtgagccacccctttagaagtcacttgggtcataagttaacccgataggaagtgtcctggccaatgaactagggaggtggtaaatggcaccattttaaatttaaattcacggccttttcaacggatcagtagccatgttgggtaagagtgcaaatgtcagaggtgaaaagaggcagcaggaccctcccctagtgcttgggcaacagaaggtggaatcactaaggggacaagactttagcatgctcaagtacacaggacagaaaacatgctttttacaaaagctggtaaatatgaagagggaacattttcaagttcctgtaaccaagaactaccgcctgtaaccggtgaaagtgactttctatggcaaaagcgtttttgaaaaggtgaggaagttaaatatcttaatgttgggaggttcttctggtttatctggctagaccctaatggaatcccaagtgtccttatggagcggggagcagagagagagatttgagtccagacgaggaagaaggtgatgtgagtctgggtgcgggacagggggagaatgatgctatgtggggatctgggctggggaatgacttagctgcatgagcggagtgacttagactcctgaactagaagaaatctagggctcatcacctcagcagccctaaccatcaaccttatttttattacaggtcttccatcgacggactccctaaaaagccagcggcgtggaggggcgccctctattggacaaatagatcttgactactttcggccctcaaatagcctgactaggcaaataacaaataataataatttttttttaaatcatggaaaatattttaaaaaacaattaaaaagttataaatctataaaatctgcttctgtctgtgtgtctgtatatttagatgtctcatgtgtacataatgtttcactaccaaaatatatgatgaaaccctcattaatcggcttagaaaactaaacacctaaatattttctcagaaaatacaaaaactttaactcaaatcccttttaattcacctgactttaaaaatctttaaaaaataaagcatgctttaaaattattagtaaagtaaaattagaacatcttcagaatttagacatttggtttaaattatacaggtcaaatactgcccttagtaaatattttcaggtcataaacaactcctgtaatcttttaaataattgaattacatgtctgttttagagctttaagttctagctaaagcctggggacaaatgaagggcaccatgccccctctctgtgctggaaagagacattttctacagctctgacccttgcagtaggctttgcaactgctacctatcaaaattgcctacatcctaagtttattattaaaaggagttgcttggagttaacattataatgaatatatgtaactaaaactatttctcatacaaagtatatgaaaaagtagaatgtatttttaataaaaagttataaaaagacatgaacatgtagtttttataaaaaacagtaattttgtctagttttgcagttctaaaaagttatgttaaattcaaaaataaaaaataacaagacaagactcaaggtttaaataagttgtaaaagatttgtaaaaattagttctataaaaattttacaaaaaaaagcattggttaaaatttaaggaattattttgtttttacagaaattaaacattcattaaaaacactctgatacaaggccttaatttgggttcatgtatcagaatagcagggttttcttagaatattaatctattctttaaaagaactatgaatgttatgcaaactttataaaaatcttaccttagagtcaaactgattaaaattccatagattttacgtaaaattttattaaaaattaacttcaacaaaaataaaatttgattttctcctttaaacaaaagttttgcgtaatattaaataataaagcatttttgtttaccttttaaactataaacacacacacacatacacatacaccaacactaaagtcagctgacctcatactgtctttattggatattcttgtttaaaaaactatcttctttggaaaataaagttttttattttaaaccatattttaaattatcattttgactaaatccataacatacagtgatctgtaataattctattttataatatcaagtgttttgaagaactccaggaacagccatgagagaacactgtggtttagtaacactttatttcctcagtttgaaaatagttgtctttcttggggaggccggtttcagcagatgaaaacaagagtcatgatgaaaattacccagcagtggttagtgtgaccataggaacattgtcatcaggtcagcagaaaacatatcagcaaatttttctcatactggcagtgtgtaggggtggatgtttacagttcctgaagccccagtggtcgtgtggtcttttagttttgccatttataggcaacttgtggtaactagctcaattagacacattccttatcacaaggacagagggctttctgtatcctagggttcttgccttggcattccagaagaatcaggtcacacgtggacgtggagaatgagtgcaaggttttattgagtggaagtagctctcagcagatgggggagccagaaaggagattggtttctccctggattggggccgttcagcagccctggctctcctctgactgccccaggcaaaatccacatcgttctataagtcggtgccctgctggtgtgctggtgcctgttgtcatgttcctcttcatgtccagccgcctgtgtgttcctccgctgatgtgctcctctcgacgtcaagcctcctgtgtgtctgactgctagggtcttggggtttttataagcacaggatgggtcttagcaggccaggatgatcttgggaaagacaacattcggtcaggaaaacaaaaatgcctgttgtcatctaggtccgtggggacaagcccaggtgtggagcttttagccagggaccacagcctcctgtatccaacacttcccttcaccttttctatatcattcaaagggatcatgcccttcccatcccagcacttcactttcatgtcatttgccccctctgaagaggtacatctaactgccattagaatatggatgatgaccagtcttagctgcttcctgctgaaagggggcattgttttgggggaaaacggcagtcagattcctcccaggggtctctataataaaagatcgaggtggctactttcaggaggtcctctaatgtactatctggtcccaagtcccatttctgcaacctcctcctgatgtcaggagctgcctgagtaataattttatcctttaggattatctgtccctcgattgaattaggagatagagaggtgtgatttaccaaggcctctcttagcctctccaggaaggcagtgggattttcatcaaatccctggttaattatggacaacttagtataattgagaggcttggtcttagacctacgtaagccctctattatgcacacctgaaagtgtctcctcttccagtcttccatctcattattgggatcccatttagggtccttcactggtgctacttctcttccagttggataatattcgctcccttccctgatgctataggtgatgcaaagctcatccccaaatctctctgctgctggcagagcagcctgcttctcagtgtctatcaggttctgactcaaaagtaacataacgtctctccaggagagttcaaatgttagggtgaaattctggaaagcttctatatatctatcagggtcatctgaacacttgcccagatctcccttaatttgctttaagtcttgtagggaaaagaggacttggaccttactgggcccaaattcactgggcatctgtaggaggggcaagagtgagactgggcttgtttgggatgaagatttctaggaggggccaggtgagaggctgaagctggatacggaggttggggtggacccagaggagcagggcttgagggagctggcacgtcagctgggggtgcgtctgggactcgtgtctttaattccctgggcttgaccctggcagccttccccgagacagcaaacaggagggctggaacaatcctacatgtcagcaaaggtctggattgctttgcaaggtatagaaagcctgcacatttggggcctcagaccatgtgtcctcacatccagagaaaagttctaattgcaggatggtattgaaatgaatggtcccttcctgaagccaagccagtccttcctgtaaaccataatttggccaaacctatgtgcggagggctatgagatgcttttcctctggattctgagggtcaaaacagtcccaatggttcaggatacactcaaggggagtacaagctgggggtggtgaggagaactggctgcccattctgaaagacagggaatagaggtgttcctcatttcccttccttcttttggcaaaaagctcagggtgtgatggggagggaaagcaagcatcttcacttcactttccacctcttacccctgcgccctggcaaccttggcaggtgccggccacaggtacaaatgcggtatgtacccatgaagcagggagaacctggagattaggaattaactgccctcacctatgtttccttttctccctgctgttgaaaaactttgagttccctgggcctttttatcccatgaggcatggcctccttctgtgggatggggttcagtcagcaggaattggtcctgtccatttacattgtgcctgttgcctggctttgaattcctcagacctgctttctctttctagggcctcagcctgaagcttggaattgagtttgggactgaaaaagcatttcagaggctgtttatatccatttagtgcctcaaataagccctgctgaatttgcaattatcagccagcaggggtcactcctctgttaacttccctattagaaacagagcggtggggattctcacttagaaaagaaaaaaagagaaaaacagttaaagaggcaaaaagtggggaatgctgggggaagaaccccttgcttagtgcaagtgggcccctctaatccttataactttcccatccttcccccagttcagaccaggttgaattccttggccatggaaggaaaggttccattgatgcagtgggtgagaagcactctgtagggtcctggctaccatcggttttctcacacccccctcatcccaggcagtggagggagacacttctgcgacattgctccccctgccccttcatggctattgggtgtggcctttgcctgctgcaggcatgcctaggtgctggagctgggagggaaaagggtaaggagaggtgccctggaagccgctcatgcctggggctgtcaaggtggaggcatacatggcacctctaggaaaaattggtctgatttgcacctttggcggctgagccaaatgctcattttacttagtaacattgcctcagcctgtagcaaaactcttaacattataaaggaagagataagatccatttcaaataatgtgtgagagagaaaagagatgaaaggaaaacagagtcttttacctgcaggaaagggagagaagtggcagagttttggaagaaaggcaggcccaacagtttcccattcactcacactcaccttccgagatcccagacgagccaccagttgaaatgggaaaagtttccttgtccccctcacaggaggtggagtgggggtgtggcttgcttctttagtactccgctgctcaaacctctagggaagcatacagactggcaagttgtggggctacaaccccatggcagcatctaggggtagatgtttacagctgctgaagccccagtggacatgtggtaccatgtgctcttttagttttgccatctataggtggctttgtggtaaccagctcaattagacccattccttaacccaaagacagagggctttctgtatcccgcggttgttacctaggtgtaccagaaaaatcaaatcacacgtggtcttggagaatgagtgcaaggttttattgagtggaagtagctctcagcagatgggggagccaaaagggagaatagttttcccctgaagtcgggttattcagcggcccaggctctcctctggctgccccagccaaactctatgtcaatccattggtcggtggcctgccagagtgctggtgcctgttggtggattcctctcagcgtcgagagtttttccctctcaggaaagggagagaagtggcagccacccatgtgttcttgcactgatgtgctcctctcgacgtccaacctcctgtgtgtctgcctgctagggtcccagagtttttttaggcacaggatagggcatggtgggccagggtgatcttgggaaatgcaacatttggtcaggaaaacaaaaatgcctgtcctcatctaggtccaggggcacaagcccaggtttggagccctagccagggaccccggcctcctctacccatcactttccttcaccttttctgtatcattcaaagggaccatgcccttcccttcccagcacttctcttctgtatcaataggtgatgtttttaaaatttcccaactctagtgcaggcatggtactagacatatacatagaaataaaaccacacttattcttctggctggcaagacatagtatttttgccaaattatgtgttgttttgaagcattttatgtacccctggtcatataaaaataaagctattttgttcagtacaaacagcagcattttctggattagaaagttaatcatcttaaaagatcatcacggatttttccattgcactcatcactaattgctttggcaaaaaatttcttatctcacgcatgacaaaatcagccgcagtatctcctagtaatttaatggtgatgatctttataaaggaaataagcacatcaagggaaaacataattttttttaaaaaaagagtaataaaactttttaaaagtcttttttaaaagactgcttttctaaaatagtaaaataaaactccaccaataaaaccaccaacaaaacagaaaagaaaaaataatgatatgatcggagctatttgatgaaagatggtaaattaaatttaaaatgattagaagagaaaaagcaatacctgtctcccgtaggtctcagtccaggttctgctatgcctttctcctggtgagccacctatttaagagtcgcttaaagcatatgttaatccaacaacagcagattaaaaaccaatgcaatctgaactatttgatctaaaaacataaataaaatttaaaacaaataaaagagaaaaagcagtacctgtgtcctgtaggtctcagtccaagatctgctctgactcccttgtggtgagttagccctttagaagtcacttggggtggggcatatgttaattccactaacattggttctggccaatgagtcaggaaggtggtaaatggcaccttttcttcttgctgatttctttcagttcctttggagtctggacattagtcctttgtcagatgcctagtttgtgactactgtttcctatactgtgggttgtgtgtttaccctgctgatatttcttctgccttgcagaagattttcggtttcattaggtcctattgatcttattctatttttatatttttgcgtttgcttttggggcattagtcatgactacttggcctaagccaatgtctagaaaagctttttggatgctatcttgtagcatttttagactttcaggtcttagatggaagtttttatatgctttgttaaagatcaggtgactgaaagtaccgggctttgtttctcggttctctattctgttccattgctctatgtgcctatttttatacttcctgcaccatttattgaataaagtgtcctttccccaattagtgtttttgcatactttgttgaagattagttgtctgtaagcatttggctttatttctgggttctctattctgttccattgctctatgtgcctatttttatacttcctgcaccatttattgaataaagtatcctttccccaattaatgtttttgtgtactttgttgaagattagttgtctgtaagcatttggctttatttctgggttctctattctgttctattgctctatgtgcatattttataccagtatcatgctattttggtgattgtagccttgtagtataatttaaagcctgccttcagatttgttctttttgcaaagtattgctttggatatgcggtcacgtttttggttttgtataaattttaggattcttttttctagttctgggaaggagaatgatgatattttgatgagaattctactgctctgtagatggctttggagagtatggtcactttcacaatattgattctacctattcataagcttataatgtgttcccatttgtttgtgtcaactgtgatttctttcagcactattttgtagttttccttgtaggaaacttacattaacctacttggttaagtatatttctaagtattttacttattaaaaattctcagggaaatgcaaagtaaaactgaggtgggaaattaaagaaaaataaaattaaaaagaaagggaaataagctttcttgtattaagctaacttgtcccagaggcagcaacaggcacagcccagacccaggaaaagtcttgataatattatttattgtattctggagactcttccagcactccttcaatgtagggagaagaaaaacaaattttcctttgttttatggtatgagtttatagattcttgttctctttaactagtaacttcaagtattctgttttatctaagaagtatggcaaaggtcatgagaagcctgagcaggcctgaactacagctctctaggcaccatagtgaagataaaccaatgcaagcctctttagagcaaaacctagataatagacatctgggttgcatagcaacagttatgtgcaatcctgagttatgaacctgttacaatttgattaactgtctttttcctgcctctgtatccctgctttcacaccactgtaagcttgcttcaagctggcccacccccttttgtgaagtgtgtataaaagtcaagtgctgtctttgttccaggccctgtctttggacgtgagtctgctgggcctgagagcactcaataaaagattctcctgttttaacccaaagcctctctctcatcctcctaaatcccacaacaaaaccacaatgagatgctatcttaatcttgctagaagcccataatttaaaagtcagaaaacaatagatgttggcatagatgtggtcaaaagggagcactttgacactgctagtgggaatttaaactagtccgaccactatggtaaacagtatggggattccttaaagaactaaaagtagaccattcattccagcaatcccattactggctatctacccaaaggaaaagaagttattccataaaaaagacacaagaatatggatgtttatagcagccgattcgcaattgcagtgatatgggaccaacttaagtgcccatcaacgaacgagtggataaagcaaatgtggtacaccatggaataatacttgataataaaaaggaacaaaataatgtcctttgcaacaagttggatggaactggaagccattattctaagtgaagtaactgaggaatggcaaatcaaatattgaatgttttcacttttaaatgagagttaagctatgagaatgcaaaggcataagaatgatataatggacttggggactcagggggaaaggttgggagggggatgaggaataaatgatgacatattgggtatattatacactgctcaggagacagatgcctcaaaatctcagaaattaccactaaggaacttttatccacataaccaaaaaccacatatattccacacactattgaaagaaacataaacattattttaaaaaataaagccacttttaaaattagcaaaataaaataaatatgtcttcagagtttagatattggatccaaattagacagatcaaatactgcctttactaaatattttcatgtcattaacaacttctaaaacctttcaaacagttttttgacatgtcttggaaccatccatttctagctaaggcctgggcacctgtgaaatagggccatgcccccccttatactgggaagagtaagatatttcaagactaagatgttttctacagctccatctttttctttaagctctacatcaaggacataattaaaattggttgtctcctaagtggtttactaaaaatgcatacttaagagttaccattataattaatatttgtatctaaagctacttaaaaattttcacacacaaatctgactgaacaagtaaaatatattttaagtcaaagtttataaaaggacatgagaacatagcttttatgaaaaaattagttttgtcaagtttagaggttttcaaatattttaaattcaggaaataaaataacaaaaagacaaaagaaaatggttgaacaacttagaaaaggtttgttaaaattcatcttataaaacaatctacatgtaaaaagtgggctaaaatttgaaagagattatttaggttttccataaattaatccagaaggggtaggaagtcttaagaatgaggaaggacaggaggaaggggaggtcatcctgacactgcagaggcagaagtgcagctgaaggtatgaaggctaagaggggaggggagtttgagtgctgctgcctggctgtcagagcagaggagggtcctgggcaccagacttgaggaagggatgaaaatgctgggcagacctgtagtgggcccttgagatggcagatagtggtttccagagagagggccattgttttccagtgcccagcactgagcagagagagttttgggcagtgtaaaaaaaaaaagagaacttacctctttctcgttttagaaaaagaacagtctaagaatatcagcagggaaactctcagtgcttcaaggggttaaacgcccttttggctttcttgtgttggtttcatcatagaggaggagaaacttcttggaagtgttcctaaaaacacaacacgtctgcttctcctttcaaaaaaggaagtgctaaaacacgaacactctagatccaaatattaatacggatgtctaaatgcttccgttttccaaggggcagaaagctaaaggttgtaacctattcatttcagtcaaagttggtgaaagggaagcaaaggaactgggtggggcttggaaggatgacgaagctcaagctcattggccagcaacctctctcctgggggcgggaggggtgagcatacgtcattgctttggcttctataaaatgaggaggactcaccgagtgtgaagagtccttctggtgattgcagctgagagcacactcacgacgttctgcaaggattctctgattatgattctgaagggaaaagcgatggaatggacagcagagattgtaattttctttatcttgaattacggaagaaagtatctaggacagaaatccacgacaagtccttggaaccagcagatctcttcgttcacggagacgttgacgtattctctattgaagaagattcttaccttcttactggacaaggttttgtcagttctgcgtgactggattgtccgggagactctgaggaaactgatgtcacatgtttttccaaagaagatgtttctggaaccaacaactgtgattgtggtttgaggacttctgagagttccagtacaggaaataagcagaacatcagctggaggctaaacggatccagacttcactcttcacttcccttcctattcagtctattgtgcctgctgactgagaagcttggctggtatgtgagcaaataaacggaactattcagaaggagatgttgacatattctgtattgaagaagatccttatcttctcacctgacaaggttttgtcagttctgtgtgactggattgtccggaagactctgaggaaactgatgtcacatgtttttccaaagaagatgtttctggaaccaacaactgtgattgtggtttgaggacgcctgggagttccggtatgcgaaataagcagaacatcagctggcggctgaagggatgcagcctccactcttcacttcccttgccattccatctattgtgtctgcctgactgagaagcttggctggtatgtgaggaaataaacggaattataaacaaggagattgtttctcatctacttcattctgttgtggcttttctattttggggttcagggtgtgtgacaaggaccaaggagatgaaaggtttcatgatggagaaagcccaggcaatcagattgaagagctatccacagggaatcttggctgctgaggggctgcaccctgcaacggactgaccatatgacagaaaagggttttaaaggctcaacttctggactgagaacccagagtaatttgggaacctcctctgtgaggagatatgaaagctgggaatcatgacatccctaggaatggaaggcacatttcctgatggaaggggtgctttggaaaacaggagcagagtagacacagcagccttgtggatacgggtgggcagcatgcatgggtgatgtgaacgtggagtgtttgtgatcgaaactcaaaatgtctgacaaagtgaaaacctagaaaccacaatgaggaggaagagtttgtgagggcaatcactctccccatgtgtgaaaatcgggggctcttaaaatctcatctggagaggtgcagtctaccaaactctgggactttagcctccccttttaaaaaaccgtgcatcaataccaacgtccgaaaccacagaaataacacctggcttgcatggagacaaggacaaaaagccgtcatgatgagttgttctgctcacttgctgcctctgttcagtgcacaggatattgtccacccactagcaggctactgcaagagaagtgtgcaatatgttccctatgtgccatatatgtgccatatggcccatatgacaactgagtcagaaaatatctgatgccctcagagttacactccacctggagcttgcccccagccatccaggacctaggctccctaccctgtccaattttctggtgttttgggggcttcattctctaaggtgtgcccactctttactcaaaccaaaacacccacatattcctgcccatgaacaaccaatcaaccacttctcagttccacatcctgctgttgggtctctagtggtgacactgtaactcccaggtcatagtggtgacactataacacctagctaaattgatgccttgtctctaggaggccatgggctcctgcaggtctcatctgactctctgtagccttccctgacaatgctcacaatacccaagccagagccacattgacagcaagctgctctcatcttacctttgccagacctggccactggaaaaggctgaccctcatcctgcaatgcctatacctccaacctttgtctcaagctggtgtcctggagggacttctaagcagaaaacagattcagactcccatcctctcctgaatggcctcatatccaattctcagaccctcagccttcattgtaaggacacttcatccatgcccttgagtattctgtctgcactgtgtattctgcaatagattctcctccctctgcgaccctcaactccttccgcagactttttgttttcttgatcatctaccatagtcttccactgggacactgccaagcccattctggagagtgagttgtgcaagtacactgccccccatctacctttcgggaggtgtatacacccttctttctcccaggtctggaggctttctattttcatcctgaggcatctccacctgctcttggattcttcaaattgacaaccaccagttaacaagaactatgtgtcaccaaatagccaaacaatggcaattacaaaaataaaattaatagctgtaacccccattagcaaggatacacaaatcaaatcagggatagtgggtgaggaagtctgcctaacattcaaggaaggattctgaagtgatacaaaatcattgcctttgctatctttagaatggacactttcagccaggcacagttgctcagcctgtaatcccagcactctgagagccccagttgggtggatcacttgaggccagcagcttgagaccaccctgggcaatgtgcagaaaccccaactctactaaaaatacaaaaatagccagttattgtggcacatgcctgtaatcccaactccttgggaggctgaggcacaagaatcacttgaatctgggagccagagtttgtaatgagcgaagatcatgccactgcactctagcctaggcattagagtgataatctgtctgtggaaaataaaaacattcctcttcaaagttttcttctttaaatcataaatgttggaattaatatatcctctttgaaactcactttcttcaagcttctttatttgatggtagtaaatctttgttaagctttatgaggcaagagtaatggaagaagcatattatatatatttatactctaacctcagtgcttgttctagcaagctcaggcatgcgtgaatgtgcccaggcatgttccagcccataccttatatcctttccttattgggaaatgctgttactcctataagcattcttgtaagcaacttcctctttttctttgtctccactatctttacctattgaggacagttttaggttcttagccagttggatgtagcatagactgtgaggtccaaccccagccaatggagatagcacacagcagtagcgacctcatgcttaacagataaatattcctgtctccctttgtttggggtgctctcagctgatgagcaacaccctttctaaagaaattaaagttgtcttgctgagaaaacttttggtctaaatgctgattcttccttgcagcactgaagaagaagcaattatttccaacactttctcatacacaaaaaaagaagaaggtggaagaaaactttcttgtgcaccctatccctcactcagaaagacaacagaaggctcctagtggcaagccctagaggattcatttcttttgggaaccctcttggctgggatactaggactcaggtcaaactcagcattttcagtgtgtgggaagtgtgcttgggtttcactgttacttccaataatgtgatttggtccttggggttcaccaaattttggtatggagtggtgaaccctgttaagtttaagtgtctataaaattaacaaagcaaaataaccattctgccccatggttcagagaccaaatattgtgtaggaaatgctttagcgagagaaacagagaagaataaaaaatgtcctcaagcgctgcattatttcttgttatcgtccagatcttagaggaaaggctttcattttccctcattcagtatgatattagctgtgcatctgtcatttatggcttttattatgttggggtatgttccctgtgtatgtagttttttcagggtttttgttatgaagtgatgttgaactttatcaaacgtttttcagtttcagttgaaacgatcatatgctttttgtccttcattctcttgatatgatgcatcatgttgatgatttccatatggtgcactgtccttgcatcctgggcatgaattccacttgatcatgacaaatgaatttttaatgcattcttgaattccgtttgctggtattttgttgaggatttttgcatcaatattcatcagagatattggcctgcagtttctttttttttcttttttctttgttttgttgtttgtttgtttgtttgttttgatgtgtctatgtctggttttggtatctgggtagtagtgttccatccccttttattttttagaataatttgaataagactggtgttggttctttaaatatttggtagaattccgaagtgaagtcattgggccccgggcttttctttagtggaaggctgtttattatggcttcaatctcgttacttattattggtctattcatgttttgaatttgttccttatttaatcttggtaggctgtgtgtatctaggaatttgtccatttcttttagattttcaaatttattggcacataattgcccattgtagcctctaatcgtcatttgagttcctgcagtaccaattataatgtctccttcttcatttttgattgtatttatttggatcctgcccctttttttcttacttaggctgcctaataatttcttaattttgttgaactttttcttttgtttgtctcgctctgccaccaggctggagtgtagtggtgtgatcttggctcactggaacctccgtctcccaggttcaagcaattctcctgcctcaccctcccaaatagctgggactacaggcaagtgccaccactcccagctaatttttgtatttttagtagacacgggttttcaccatgttggccaggatggtctcgatctcttgacttcataatccacctgcctcagcctcccaaagtgctgggattacaggcatgagccactgcgcccagcctaattttgtttaaattttcaagaaatcaacttcttctttcattgatttctgtattttttatttccattttatttatttaaactctaagctttattctatcttcttctcattttagctttggtatgcttattgcctctctagctctttaatgtgcattgttagattgtttatttgaagttcttcctctctacaccataagacgtaagcatgtcctcattatgtcataagatgtaaccacttacagctataaacttccttcttagttctgcttttgctgtatctcataggctttgttatgttgtgtttccattatcaattgtgtcagaaatttttcaatatttttcttaatttcttcattgagcaactgatcatttgggagcatatttttaaacttccatgtacttacatagtttccaaaatacctcttgtgatcaatttctagttttattccactatggttcaagaagatgcttgatattatttcaattttttttcacattttaagatgtgttttgtgacctaacatatggtctactttttttttttattaaactttaagttgtggggtacatgtgtagaccgtgcagttttgttacataggtatacacgtgccatggtggtttgctgctcccattaacctgtcatctacattaggtacttctcataatgctatccctcccctaacctccaccctctgacaggacctggtgtgtgatgttcccctccctgtgtccatgtgatctatttttgagaatgatccatgtggattagaatgctgtggaaaagactttggattcctaatatccagggagggagacgatgatattactttcaatatcacacgggtgtacacactctctgtgacattgttcctaatatccagtggaagagaggatgatataacacccagggagggagaggatgatattactcttaatattgcagggtgtgtacccatgcctatgatattgttcctaatatcaggagggggagaggatgatattactcagaatatggcagggggtgtacacacactctgtgacatggttcttaatatacaggggagaatgggacaatattactctcaatatcgcagggggcgtacaaccctgtgatttgttcctaatatacaaaaggggacagtatgatattgttcctaaaatcgcagaaggtgtacaacgccctgtgatattgttcctaatatccagggcgggagaggatgatattacccccaatatcacagggggtgtgcactttccctgttacattgttcctatgatccgagtggggggaaatgacattagtcccaatatcgcaggatgtgtacactactcccccatgatattgttcctaatatcaagggggagagaggaggatattactcccaatatcgcaagggaggtacatcctccatgcaatattgttcgtaatattcaggaggagagaggaagatattactctcaatatcgcagaaagtggacacccaccctgtgatgttcttcataatatccagggaagcagacgattatatgactttcaatatcgctgggagtgtacatcccttttgggatattgtttctaatatccaggaagggagaggattatattacttccagtattgcagccagtgtacacatttcttgtgatattgttcctaatatccagaaagggaaaggatgatattactcccaatattgcaggtggtgtacacccccctctgatattgttccttacatcaaggaaaagaaagaagaatattactcccaatatcgaagagagtgtacacccctcctgtgatattgtatttaatatccatggggaaagaggatgttgttactcccaatatcgcagggggtttacacccacactgtgatattgttcctaaaatccagtgaaggagaaaataatattgctcccaatattgcagggtgtatacaggccctcccccgttatattgctcctaatatccagcggtggagaggatattactttcaatttttgcagggagtgtgtaccccctctctgatatttttctaatatcaaggatgggaaaggatgccattactcccaatatcgcaggaggtgtacatgccctgtgatattgttcctaatatccagggaggtagaggatgatattactttcaatattgcaggggctgtacaccctctatgatgttgttattaatatttaggttgggagaaaatgatatttttcctaatatcctgggaaggaaaggatgatattactgtaaatattccagggagtgtacaccttcctaatattctaatattgttcctaatatccaggggtgggagaggattatattactcccaatatcgcagtgggtgtacacccctcctgtgatgttgtttctaatatccaagcgaggagaaaatgatatcactctcaataccgcagggggtgtacaccttccccatcatatcgttcctaatattcagagggaaagaagatgatgttactttcaatatcgcaggggttgtacacaacccctgtgatatttctcctaatatccaggaagaaagaggatgatattgctcccattatagcagacggtatacgcctccctgtaacattgtttctaatatcaagactgggagaggatgatatcacttccagtatcgcaaggggtgtacacctcccccgtgatattgttactaatatccagggggaagaggataatattactttcaatattgcaggggctgtacacccccgtgatattgttgttaatatttaggttgggagaaaatgatattagtccaaatatcgcagagagtgtacacacttccgataatattgttcttaatatccatgggggagacgatgatattacacccaatatcgcagggggtgtagtctccccttgtgatattgtccctaatattcagggaagtaaacgatgatgttagtgtgaatattccagggagtgtacaccccctttgtgatattgtcctaatatccgcaggagagaagataatattactcccaatatcgcagggggtgaacacaccccctgtgatattgtttctaatatccaagcgaggagaaaataatattactcccaatgtctcaggggatatacaccttccctatgatattgtttctaatattcaggtggaaaacgggtgatattactcctaatatccaggaagaaaggggattatgttactccccttatagcagggggtatacacctcccctgtaatattgttcctaatatcaaggctgggatatacgtggggggaaggatgatattactcccaatatcacaggggttataaaaccttctgtgatattgctcctaataaccatggcggaagaagatgatattactcctaatattgcaggaggtgtacactcccccattatgttgttcctagtatgcagaaaaggagaggatgacattattgccaatatcgcagggtgtgtacaccacccatgatattgttcctaatatttagagggacagaggatgatattactcccaatatcgcagggggtgtacacgcatcccctgtgatattgttcttgaaatcgaggggaaagagaattatatttctctaaatattgcagagggtgtacaccgccccctgtgatattgttcctaatagccgggggcggggggagataattaaattactttcaatatctcagagagtgtacatcccccttgtgacattgttcctaatatccagagcaaaagagaatgatattcctcccagtatcgcaggaagtgtacatttaacctgtaatattgtttctaatatccagggggaagagaatagtaatactcccaatatcgtaggggttgtacaccttttctgtgatattgttgcaaatatttagaagagagagagaatattactcgcaatatcacagggaatgtatacttcccctgtgatattgttctaatatctagaaaaagagaggataatattactcctaatattgcagggggtgtacacccccacttgtgatattgttcctaatataaaggaaggtcgaaaaacaaacggggagcccagggggaaggaaggcaggcgaggaagaggcagcgccggggcgccggagggagcagccgggccgcggaagcgcgagcacgagaccggtcgcggtcgcagtcgcatttttgccgttgtcgcggccgccgccgccgaggcttacccggggatgtctgagcccgcgcctcgcggcccccaagctccacgctgcgcccgctgtcccggcctctaagggccgccacgtccctgcggcgcgcgcaggcagaaagcggcttcgtgccggcggagggggcccgggcgggccgggaaaggctgccccaggccccgcgcctaccccatcaccgcggccggcgccgggccgggaggatgagcggtgtggggctctgaagcatggagggggttttgtacaagtggaccaactatctcacaggttggcagcctcgttggtttgttttagataatggaatcttatcctattatgattcacaagatgatgtttgcaaagggagcaaaggaagcataaagatggcagtttgtgaaattaaaggtgacagctttggaggggaccacccttgattggatacataaattctgttcattcagcagacaacacaagaatggaattaatcattcctggagagcagcatttctacatgaaggcagtgaacgcagctgaaagacagaggtggctggtcgctctggggagctccaaagcatgtttgactgatacaaggactaaaaacgaaaaagaaagaagtgaaaccagtgaatcgctgaaaaccaaaatgtctgaacttcgcctctactgtgacctcttaatgcagcaagttcatacgatacaggaatttgttcaccacgatgagaatcattcatctcctagtgcagagaacatcaatgaagcctcttctctgcttagtgccacgtgtaacacgttcatcacaacgcttgaggaatgtgtgaagatagccaatgccaggtttaaacctgagatgtttcaacggcaccatccggatcccttagtttctcctgtgtcaccttctcctgttcaaatgaggaagcgttctgtcagccaccctggttcttgcaccagggaggagtagccactgtataaaagaaccagtatctgcacttcaccgactctcccagcgacgccgaagaacctactcagatacagattcttgtagtgatattcctcttgaagacccagatagacctgttcactgttcaaaaaatacacttaatggagatttggcatcagcaaccattcctgaagaaagcagacttatggccaaaaaacaatctgaatcagaagatactcttccatccttctcttcctgaagaaactgtagtgtccaactttctctaagtattgctatgcaaaagctgctgtaattgaactattgttatagggagtagttttttcccttaggactctgcactttatagaatattgtaaaacagacaaacaagaaaacaaaccacatacttttgaagcgtgttttatctttatatagtttgtttgcaagagtattttcctaataacttcacagtatgaatgtgcatcttttttttctttttttaacaaatgatggtgtaacattttgacatccataaggacaaatgtagatatttttctaaaaaaccgtgaggggactgacagcttggtcagggtgtattgtagcttataaacatgaaatcttacaaggtttcagtttgacagaagtgtgatatatgtaacttgtgccatggaccaaatggtcactttaccacagctaaaaatgagttatgatagcagcttgatggtgattgcattgtattcctttaatcaaaaaggaaacgcaatattctaagtatctttagcccaaataccatgacatattgagcatctttaaataaccagactgtattgtccttcatatgtgaagttgacactactgatttgtcaataccaaattttgggttaaagtgtttaatttttatttatttattttcttgttgcctcaaaagatgattgcattctaacttttgtgacctaccaaatttaagatgtgtatacattgttctttacgttgttctagaaaagagattttaatgctgtagtgacttagctcacttacatcagagaaataaacaactttcaatggaaaaaaatatatataaaggaaggaagaggatgatattacttctcatatagaaggggttgtacaccccccttgtgatattgttcctaatattcagggagggagaggattatattactcccaatatagcagggagtgtacacccccccccccgtgataatgttcctaatattcagggaagcagaggatgatattactttcaatatcacagggggtgtgctgtccccctgttatattgttcttaatattcaggggggagaggatattattatgcccgatatcacaggagaagtacaccccacaagtgatattgttcctaatatccaggggtaaagaggatgatatcgcaggtggtgtacacccctccccgtgatattgtttctaatataaagaaggagagagcatgatattactcccaatatcgctggaggtctacaccccccttgtgatactgttcctaatatccaggaagggaaacaatgatattgctgtgaatattccagggggtgtacacccctttgtaatattgttcctcatatccagggggtagagaggatgatattactcccaatatcgcagggggtgcacggccccactgtgatattgtttttcatatccaggaggggagaggatgacattactctcaatatggcagggggcgaacaccccctgtgatattgtgctagttaggttgggagaaaatgatattactcccaatatcgcagggggtgtacaccgctcctgtgatattgttcctaatatccatgacgggagaggatattactcccaatatcgcagggggtgtacctctcccctgtgggattgttcacagtatccaaaagggaagaggatgatgttactcccaatatcacagggagtgtacaccaccattgtgatattgttcctaatagccagggaagaaaacgatgatattattgtgaatattacagggggtgtacacaccccctgtgatatggtttttaatatacaggttggaaaaggatgatattactcccaatatcacaaaaggtgtacacacccccccatgatattgttcttaatacttcggtggggagaaaatgatattagtctccatatcacaggggtgtgaactcctccggtgatattgtttttaatatcaagaggggaggagatgatattgctttcaatatcgctgggggtgtacatccctcctgtgatattgttccttatatccaggcgaggggaaaataatattactcccaatagtacacaccccatgtggtattgttcctaatactcagggggaaagaagataatattactttcaatatcacagggtttgtacacctttcctgtggtatagttttcaatatccagggggaaggtacatgatattactcccattgcagcaaggggtgtacacacctcctgtgatattgttcctaatatccagaagtggtgaggatgatattactcccagggggtgtacaccccacctatgatattgtttctaatatccaggggaaaagagtgtgatattatgcccaatatcgcagagggtgtacacttatcctgggatattgtttctagtatttggggagggaggagaggatgctattattctcaatatcgcagaaattgtacacccccgctgtgatattcttcataataatcagggaaaaagaggatgatattactaccaatattgcagggggttacacttcccctttggtagtgttcctaatatccaggaagaaagaggatgatattaatcccattttccaggaagtgtacacccaccgtgtcatgttgttcctaatatccagcagggaagaggatgatattactcccaatatcggagagggtgtacacttcccctgttatattgtttctaatacccagggggaagaaggatgacattactgccaatatcacagggtgtgtaccccaccctgctattgttcctaatattcaaaaggaaagatgaaaatattactcccaatatctcagggtgtgtacacctctcctgtgatatcgttcctaatatccacaggaagagagaatattactctcaatattgcaggggggtgtacacccccctgtgatattgttccaaatattcgggcggggagaggatgatattagtcccaatatcgcagggggtgtgcaccaacctgtgatattgttcctaatatccatgcgggggaggacgatatcactctcaatgtcgcaggaagtgtacacctctcttgttatatttttcttaatatccaggagggaaaagatgatattactgccaatatcgcagggtgtgtccaccccccttttatattgttcctaatatccaatggaaaagaggatgacattgctctccatatcccagaaggtgtacaacgcccctgtaatattgttcctaatattttgggggaagagaggatgatataacttataatatcacaggaggtgtacaccacccctatgtattgttcctaatatcctttaagggagaggatgatattactcccaatatctcaggtggtgcctattccccctgtgatattgtttttaatatccaggggaagagagtatgatattacgcccaatatcgcagggggcatacaccctctctgagatattgttcataatatatagagggagagaggatgatattacttccaatatcagaggtggggtacaccccccggttatattattcttgatatccaggaggggagaggttgatattactggatatatagcagggagtgttcacatcttctgtgatactgttcctaatatccagaaaagtagaggatgatattactcccaatatcgcagaacgtgtacacctccctgtgatattgatcctaacattcaaaggggagaggatgatattactcaaaacatcacagggcatgtacactcccctgtgatattgttcctagtatccagaagggagcaagataatattactttcaatatcgcagggggtgtacacccctctttggtatgtttcctaatatccagaaggaaagagggtgctattactttccatattgcaaggggtgtacacccccctgtggtatggttcataatatccagggagggaaagggtgctattattccccatatcgcgaggcatgtacaccctgctgcggtacggttcctaatatccagggggaaagaggatgctattacttcccatatcgcggggtgtgtacacccccgtgtggtatgttttgtaatctccgggaacgaagagggtgttattacccctcatatcgctggaaatgtacactcccctgtggtacggttcacaatatccaggggattgagggtgctattactccccatatcgcggggggagtgcacctccctgtggtatggttcgaaatatccagggtaagagagggtgctattattccccattttgcaggaggcgtacacccctctatggtatgttttgtaatatcccaggtaaggggtgctattgagagaagagagcaaaagaccccccccatattgttctgtattattttatactcagtacctgttttaagaagaaacaaggaagcgaaaccaaaggcaggcagcccggcgccaggcaccagatccaaaaccagacccgaaaccaggcctgggccttcctgaccttagcctgaaagttaaaattcaacccatgacctagcaactgatgttatccatagattccagacattgtatggaaggacattgtgaaatttcttgttctgttctgtttcactctgagtactggtgcatgcagcccttgtcacatacccactagattgctcaatcaatcatggccctttcatgtaaaaaccttagtgttgtgagcccttaaaaaggacagaaattgtgcactcaacaagcttggattttgatactctagtctgctgatgcttccagctgattaaaagccacttccttcactacctcggtgtctgtgggattttgtccgcggctcctcctgctacactgtgactccccttatagagaggggtgtacacccccctttggttcctaatatccagcgggggagtaggtgctattactccccatattgcggggagtgtacacccccttgtagtacggatcgtaaaatcaaggagggagagaaggtgtaattatccccatatcacagggagtgtacacccctttgtggtatagtttgtaatatccacgacgggagagaatgctattactccccatatcgtggagggtgtacaccgccctgtagtatggttcgtaatatccggaaggggagaggttgctattactccccatatggtgggaagtgtacacccccatgtgatatggttcataatatccaggggggtagaggatgatattacccacaatatcatagaaggtgcacacccttttgtgatattgtccataaaatccagaaggggagaggatgatattacttccaatatcacagggggtgtgtagccccatatgatattgtttgtaatatcaaggtagggagaggatgctattccttacaatagctcaaggggtgtaaccttcttgtgatattgtttgtaatatccagaaggggagaagataatttttttattttaaaagtaaactttaatgtcaaaaatgcaaacttgagaagggcagaaagatcaaacagaaggctgccacttcacaattggagggttgcacagtggccgggcagaggcgctcctcactccccagacggtgaggcagccgggcagaggtgctcctcacttccgagatgttgcaggagccgggcagaggtgctcctcacttcccagaacagggggctgccgggcagaggtgctcctcactgcccagacggtttgcaggcctggcagaggcactcctcacttcccaaacggagcagcggcaagccagaggcgctccacacttcccagatggtggggcagccgggcagaggcgatcctcacttctcagagggtagggcggcccagcagaggcgctcctcacttcccacatggtggggcggcaggctagaggcgatcctcacttcccagacggtggtgtggccatgcagaggtgctcctcacttcccagatggtgtggccgccgagctgaggcactcctcacttccctgacagtggggcggctgggcagaggcgctcctcacttcccagacacttggactccgggcagagactctcctcatttcccagatggtggggctgccgggcagaggcgctcctcacttcccagacggttcagaggccgggcagaggcgctctggggagaggataatgttactcccaatatcgcagggggtgcacactccctgtgatattgttccgaatatccagagggggaaaggatgatatagctcccaaaatcgtggggagtgtacacccccctgtgatcttgtttgtaataccaagaagaaaagagaatgctattatttccaatatagcagggggagtacaaccccctgtgatattgttcgtaatatctagggggagagaaaattatattagtcttaatatctcaggggacgttcatccccctgtaatattgttggtaatattcagaatggagaagatgatattgttcttaaaatacaggaaaaaatatgataatattacttccaatatcgaagggggtgtacactctcctgtgatattgttcccaatatccagaatgaaagaggatgctattactcccaatatcccagggagtgtacacccctttgccatattgttcataatatccaggggaagacaggataacattactcccaatatcaccgggggtgtccacccactagtgatatttattgttcatcatatccagaaaaggagaggatgatattactcccaatattgcaggtggtgtacggtccctgtgatattctttgaaatatctagaaaaggagaggatgatatcactccgagtatcacagggggtgtacacccccctgtgatattgttcgtaatatccaggggagaaaaggatgatataattgccaatatttcaggggatgtgcacctccctgtgatattgtttgtaatatccaggggtggagaggatgatattactcaaaataacgtaaacatcctgtgtgtacatcccctgtgatattgtttataatatccaggggggtagaagatgacattacccccaatatcacagagtgtacacacccctgggatactgttcataatatccaggcgggaaagaatgaactacttccaatatcgcaggatatgtacacccccctgtgatatatttcctaatatttatgtgggtaaggatattacccccaatatcacagaaggtgtacatcctctttgtgatattattcctaacatccaggaaaggagagaatgatattactcccagtatcgcagggggtgtacaccacccctgtgatattgttgctaatatccagggggagaggataatattactcccaaaatcacaggggacgtacactcctcctgagatattgttcctaatattcatggggaaaagaatgctactactccaaatacagcagagggtgtacaccatccccgtgatattgttttttatatccaaagggtgaaaggctgatattactcccaatatcgcagggggtgtacaggccccccatgatatcattcttaatatccagggaggcaaagaatgatgttactcccaatattgcaggctgtatacaccccccgtgatattgttcctaatatccagagtaagagaggatgacattgctcccaatattgcaggggttgcacgcacgccctgtgataatattactcccaatatcaacagtgggtgtacactcctcctgtgatattgtttgttatatctaagaaagaagaggatgatattactgtcaatatcacagaaggtgtacagccccttgtgatgttgtttctaatatccagcggtgagaggatggtattactcgcaatattgtagggggtgtccaacggccctgtgatattgtttctcatattcaaaaaggaaaagaataatataactccaaatatcgcagggtgtgtacacttccctgtgatattgatcctaatatccaggaagagagaggatgatattaatcccaatatcacagggggtgtacatcgcttctgtgatattcttcctaatatccagggggggaggggatgctattactcttaaaatcgcagggaacttacactcccactatgatatttttcctaatatccaggaagggagaaaatgatattactcctaatatcacatatcacaatgggtgtacatctccccgtgatattgtttctaatatcaaggatgggagaaaattatattactctcaatatcgcagggggtgtgcacacctcctgtgatattgttcctagtatccagcggaggagatgatattactttaaatattgtagaaggtgtacaacccccctttgatattgttcctaatatccagggggaaaggagatgatattactcctaatatcgcaggggctgtacaaccctatgtgatattgtttcttctaatatccaggggtggagaagataatattactcctaaaatcgaaggggacatacactccccctgtgatatttttcctaatatccagaaggaaagaggatgatattactcctaatattacaagaaatgtatacctgtcctgtgatattgttcctaatatccagaggggtaaatgattatattactcccaatatcgcaggggtgtacaccttccctgagatattgtttctaatatgcagtggaggagaggatggtattactcccaacatcacaggagatgtaaactccccttgtgatattcttcctaatgttcaggacgaaggagggtaatattactcactgtattgcagcagggggtgtagagccccctgtgatattgtttttaatattcaaggttggagaaaataatattccttccaatatcgcatggggtgtacacccttctttttatatagtttctaatatctggggggagaggatgatattactcccaatatcgcagggggattacacccccactgtgatattgtttttaatatccagggtgggagaggataatattactccaaatatcccagggctatacaccctccgtgtgatattgtttctaatatccagaggaagagaagatgatattactcccaatgtcacagggtgtgtacaggccttctttgatattgttcttaatatccatgagggagaggatgatattactcccaatatcgcaaagactgtacaccctttctgtgatattgcttccaatatccagggagggagaggatattacactcaggatcacagggggtgtacaccccaacctgtgatattgtttctaatatctagggaaaatgagggtgatattactatcaatatcacaggaggtgtacactcccttatgatattgttcctaatatccaggagaatgacaggataatattactcccaatatcgcgggtggtgtctccccccactccgtgatattgttcctaatacccagagggggagagaatcatattactcccaatatcgcaggggatgtacacctacatccggcggagtagaagataatattactcacaatatcgcaagaagtgttcaccttccctgttatattgttgctaatatccagggagtgagaagatgatattactttcaatactgagcgtgtacactacccctgtgatattgtttctcatatccagtagaggagaaaatcatgttactcccaatattgcaggggtgaacacctcctttgtgatatttttcctaatatcaggaaagggagagtatgatattacccttaatattgacaggggtgtacacccccctttgatattgttccaatatccaggggggcagaggataatattattcccaatatcgcagagggtgtacaccccccgtgatattgttcctaatatccagagaaataaaaaatagtattatttccaatatcacagggcgtacattttccctgtaattttgttcctaatatctggggggtggggtggcaggataatattactctcaatattggagagggtgtacacccccctgtgatattgttcctaatattcagggtgggagagaatgatgttactcccaatatctcaggagtcgtatacacccccttgtgatattttttctaatatccaggaggcagaggatgatattgctcccaatatcgcagggggtatacacccgagctgtgatattgtttctaatatgcaatatgggggaaggatgattttactttcaatatcgcagggaatgtacactttccttgtgattttgttcctaatatccaggggtggagaagatgctattactatattactcctcatatcgcaggcggtgtacaactccctgtgatatggttcagaatatccagagtgaaaaaggagggtgacattactcccaatatcgggggggtgtacacccctttgtgatgtggttggtaatatccaggggggcagatgagggtgatatcactccccatatcgtggaaggcgtccacttttttgtgatgtggttctttatatcccgaggggagaaggtgatattactccccatatcgcgaagggcatacacccccctgtgatatagctcataatattccggagagtggaggaagatactatgccctatatcgcgggtggcctacaaccccctatggtttggcttataatatccaggggggagagggtaatattgctccccatattgtggagacgtacagccccctgtgatatggtttgtaatatctttggggggcgagggtgatattactccccatatcgcggggagcatacacccccgtgatctggttcatagtatctcaaaggaagaagttgatgtgtacaacttaagggaaaaagttgaagtgaagtgtacacacgccctgtgacgtggttcataatatccaggcgggggagaggagagtgatatttactccccatatcgcgggtgttgtaaactcccctgtgatatagttcataatatccaggggagagaggagggtgatattgctcctcatatcgcgaagggtgtacaaccccctgtgatatggttcataatatccagaagggtagaggacgatgatattactccacatatcttgggaggtgtgatatggttcgtaatatccagcgatgagagaatgatattactccccatatcgcaaaaggtgtgatagggtttgtaatatcctgagggggagagggtgatattaatccctatattgcagaaggactacaccctcccatgacatggtttgtaatatcccagggggtagagtgtgatattactttccatatcacagggggtgtgatatgattcgtaatattcgaagggggagagggtgacactactctccatatcacggggtgtgtgatatggttcttaatatcccaggggttagaggttgatattaccccctttttggggggtgtgtacaccccctgtgatatggttcgtaatatcccgggggagacagggtgacattattccccatatcgaggggatcgtacaccccctgtggtgtggttcataatatccctagggggagatggtgatattactccccatatcagggggcgtgcactcttctgtggtataattagtaatatccagggggcagaggtcgatattcgtttccatatcatgaagggagtacacttccctgtgatatggttcctaatatccaggggggagagggtgatattattccccatattgcggggggacatacaacccctgtgatatggttcataataaccagaaaagaagagggtgatattaatccccgtattgcagagggcatacaccccccctgtgatatggtttgtaatatctaggggaggaaaaggtgatattactttccatattgctgggtgcagacacccctttatgatatggttcataatatccaagttggagagggtgatattacttcccatatcatgggaggtatacccttccctgtgatatggttcgtaatatccagaaggggagagattgatattactccccatattgtggggggcgtacaccttcctgtgatacggtttgtaatatctaggggatatagtgggtgatattactcaccatatcacgggggttgtaacatggtttgtaatatccaggggaggagagggtaatgttactccccatatctcggggcatgtacaccctcctgtgacatggttcgtaatatccaggtcgggagagggtgatattactcctcatattgccgggggtgtgttatggttcataatatcctggggaaggaggctgctatcactctccacatcttgggggatgtacactctcctgtgatatggttcataatatccagggtgggtgagggtaatattactccccatatcgcgggaagtgtacatacccctgtaatattgtttgtaatagaagagagggtgatattactccccacatcgcgggtggtgcccacccccctgtgatatggtttggaatatccagggggatgaggagggtgatattactccccatatctcggtgggagtacatccctctttgatcaagttcataatatccaaaaggaaacaggagagtgatattactccccatatcgccgggggtgtacacgggagggggagtacacccccggcgatatggtctgtaatatccagggaaggagaggagggtgatattactcaccatatcgcaggtggtctacatttacctgtgaaacagtttgtaatatccagggggggaaatgagaatgattttttttttttgagtctcactgtgtcacccaggttggagtgcagtggcacgatcttggctcactgcaacccccgcctcctggactcaagcaattctcctctcccagcctcctgaatagctgggactacaggcgcaccccacaacgtctggctaatttttgtatttttattagagacggggtttcaccatattggccaggctgatctcgaactcctgaccctgtgatccatccgcctcggcctccaaaagtgctgagattacagatgtgagccaccacgcatggcccaaggagaacgatattactccccatatcccagggggtgtatatccccctgtgatatggttcagaatatccggaaggaaagacagggatattacttcccatatcgcaaggggtgtgacatggttcgtaatatcccatgggggagagggtaatattactcttcgtattgtgaagggcatacactcccctgtgatacagttcataatattccggggagtagaggaagatattatgctccatatcgcgggtggcataagccccctgtggtttggttcataatatccagggaggagagggtaatattactccccatattgtggggacgtacaccctcctgtgatatggtttgtaatatcccagaggggagagagtgatattactccccatattgcagggacatacacccccctgtgatatggttcaaaatgtcttttttttttgaaggactggttctttatttcaaaaagacacttgtcaatattcattatcaaaacagttgcactattgatttctctttctcccaatcggccccaagtagaccacatcaaaggagagtacatattaagccaataagctgtaggatgtacacctaacagacctcctagaaaccttaccagaaaatggggacagggtagggaaagaaactttaaaagatcaacaaactgccagcccacggactgcaggggctgtcacagccagatggggtggccagggtgccacaaacccaaagaagcaaagtttcaaaataatataaaatttaaaaagttttgtacataagctattcaagatttctccagcactgactgatacaaagcacaatgagatggcacttgtagagacagcagcttcaaactcagaaaagggtaatgagatgagtttcacatggctaaatcagtggcaaaaacacaatcttctttctttctttctttctttcaaggaggcaagaaaagcaattaagtgctcacctcaacataaggggaacatgatccattctgtaagcagttgggagggggtagagatggaacaaaattttggtctcagaggtcttgccatcttaatttggtcacttctaatgaaaaaaataaaaaatagaaataacattatccaaaggtatcttaaagctgaaaacttgaacagcacattttttgttgttgttgtttggctaactcctcctggaaccacctttctggcttagctagtactttgtacagagcaatgaggcttcccatagtggagtctccctgggctctgtttggctctcagcaaggcaggcctataccttttcctctcctccatggagagaggaatatgcattaaggtgaaaaatcaccttccaaaagtgagaaagggattcgatcgctgcttcagggctgtggtattatatggaatgttttacaaaaggttgctacaaaacaacaaaagaggtaattacaaaatgtgtacatcacaacatactttttaaagacattatgcattgtgctcacattcccttaaatgttgtttccaaaggtgctcagcctctagcccagctggaatctccgggaagaggcggacagtttggtgaaaaagacacagggaaggagcgggcggcggaaggagggggcggcgaaaggagaaagcagccttccagttaaagatcagccctcaattaaaggtcagcttcgggcaggctggcctcaggcggagtctggttcagagggaggagcagcagcagggtgagactgaggcgttctacatctcattcaggtcaagcagagtctggtccagcatcctttgtgtacagaggtgctcccctttggtgcatttcagtttatcttccaagtcatcaattgtcttttccagcttggctaccgatctctcagcaaactcagcatgggtctccgcctcctttattttatcagtaagaatcttgatctcttcctcatatttgtcttctttttgagagtacttttcttcagcagcactcagacacttcaggttctggtccatcagtctaatctgctcatccatctctcggcaaagggattctgccagctcagctcgttcctctgtgcgttccaagtctccttcaatgatcaccaacttacgagccacctcttcatacttcctatctgcctcttctgcaatgtgcttagcttctctgagttggatttcctggagttccatcttttcttcatcttttaaggcccggttttcaataaccttcttacctctctcactctcatcagcagctttttccgcttcttccagcttttgcagggcagtagccaggtgctcctgagcacggtccagctcctcttcaaccagctggatcccacgttcaaggaggccacctcagcctcagcctgttcccgggcccacctttctccctcaacttctcgctggaggcgctcagctcgctcctctgcatcatctgcctgctgctgcagaacctggatcttgcgcttcaccgcctcgatggtggtgatcccagccatggtgcccacccagctactgctagagctccggttcctgcctcctccgatcggcgttgcagcctcctctcacccttacttccgcctcggttcaaaatatcttaagggaaggagttgatattactccccacatcacgggaagtttacatcccctggtgatatggtttgtaatatcccagggtggatagggtgatattactctccatatcgcgaaggagtactcccccctgtgatatggttcataatatccttggggggagagtgtgatattactccccatatcgcgagggccatatactcctttgtgacatggttcgaaatatcccggtgggggagggggtagagggtaatattactccccatacagcgaagagcatacgcccttctgtggcaaggttagtaatacttcagggaaaagagtgcaatattacttttcatattgcagggaacatacactcccctgtgacatggttcgtaatatcccgggggctgagagggtgatatttctccccatatcaccgggggcctacacctgggtgtgatatggctcataatatacagggagggagagggtgatattactccacataccgagtgaggggttacacaccctcgtgacatgttcgaaataccccaaggaggagacaatgatattactttccctgtcgcgggggctacaccctcccagtgatatggttcacaatatcccggggtggagagggtgatattactccctatatcaccggggggtgtacacttccctgggaaatggtttacagtatccccggggggagagggtactattactccccatatcacgttacatatcagggtacacccccacgtgatatggtttgtaacatcccaggaggaagaaaatgatattactccccatatcgcggtggcatacacccctccccgttaaatggttcataatatcttggggtggagagggtgatattactccccatatcacgtggggcatacaccccactatgatatggttcataatatcccggaggggagagggagatattactctccatgtcgcggggggcatatacacccctgtgatatggtttgtgatatcccgggggcggagagggagatattactctccatatcgtggggtcgtacacttttctgtgatatgattcgtaatatccagacggggagagggtgatattacttcccatattgcgggggcgtacacccctctgtgatatggttcataatatcccgaagaaaagagggtgatattactcctcatatcgcggggaacacacaccaccctgtgatatggtttgtaatattcagcgggggagagagtaatattactccctgtatctcggatggcgtacactcccctgtgatatggttcataatatccagaagaaaagagggtgatattactccccatattccagggaatgtacaccaccctttgaatatggttcgtaatatccaggaggggagagggtaatattgctcccaatatcgaaggaggtgttatacggttagtaatatccagagaaggagagggtgacattactccccacatcgtggtgggtgtgcacccacctgtgatatggttcataatattcaggttaagagaggtgatattgctttccatatcgccaagggtgtacactcccgtgaaatacagttcgtaatatccaaaaggggagagggtgatattactcccatatcgtggggggtgtacacccctctgtgatatggttcataatatccagggtggaataaggtggtattactccctgtatctcggggcatgtacatcgcctgtgatatgattcataatatccagaagaagagagggtgatattaatctccatattgctgggggtgtacaaccccctgttgtatggtttgttacactgagttggggagagggttacattactctcaatatcgagtggggcatacacacttatgtgatatggttcataatatcccagggaggagagggtgatattactccccatatcgcgggaggcatacaccccaatgtgatatggtttgtaatatctacatttttttttttgagacgaagtctcgctcttgtcccccaggctggagtatgatggccggatctcggctcactgcaacctcagcctcccgggttcaagcgattctcctgccttggtcccccaagaagttgggattacaggcgcacaccaccacgcccggctactttttgtatttttagtagagaaggggtttcaccatgttggccaggctggtctagaactcctgacctcagatgatccacctgcctcggcctcccaaagtgctgggattacaggcgtgagccactgcacctggcctggtttgtaatatctatgaagggggaaggtgatattactttccatatcacgggaggcgtacaccacgatgtgatatggtttgtaatatccagggggtatactgggtgatattactccccatatcgcggggagtgtatacccttttgtgatatggttcctaatattaagctgaggagaaggtaatattactccccatatcgcaggggtttttatatggttcataatattcaggaagagagagggtgacattactctccatatcacggggtgtgtactcccccatgtgatatggtttgtaatatccagggaaggagaggttaatattactccccatatcgcagggggtgtacacctctctgtggtttgtaatatccaaagggaagaggatgatattatcttcaatatcttggggggatacagtccccagtgatattgttcataatatccagagggggaggggatgatattactcccaatattgcaggtggtgtacaaccccctgtgatattctttataatatagagggggatgatgatattactcccaatatagtaaacaacctgtgtgtacaccccctgtgatattgtttataatatccaagggtggaaaggatgatattactcctcatatcgcagggggtgtatacccctctgtgacattgttcctaatattcaggggaggagaagatgatactactcctcatatcacaggggatgtacacccccctgtgatacttttggtaatatccaggggaggagaaaattatattattccccatgtcacagagggtgtacaccccgctgtgatagtgttcataatatccaggtgaaaagaggatgatattactccgaatatctcaggaagtgtacacccttctgtgatattgttcataatatccaaaggtggagaggaggatactactccccatatcgcagtgggtgtacacccccctgtgatatggttcataatatccaatgtaggagaggatgatattactttccatatcgcggagagtgtacatccccctgttatattgtttgtaatattcagggagaaagaggatactactactccccatatcacacggggtgtatattcccctgtgatatggttcctgatatccaagagatattataatcctctcttggattatgctacctctcatatcgcatggggtgtacacacactttgtgatatcgtttgtcatatccaaggagggagaggattatattaatcccaagatcacggggggtgtacaccctcctgtgatattgtttgtaatattaaggggggagaggataatattactcccaatataattaacaccctgtgtgtactcctccttgtaatattgttcataatatccaatgggggagacgatgatattactttcaatatcgcagaggatgtacatccctttgtaacaatgtttgtaatataaaaggcaagagaggatgatactacttccaaaattgcaggacatgtacaccccccggtgatattgttcctaatatccagtggggaagaggatgatagtagtcccaatatcgcaaagggtgtacacaccccctgggatattgttcctaatataaaaggaggagaggatgctattattcccaatatcacagaaggtgtaaaatcccctgtgatattgttcgtaatattcaggaggggagaggattatattactcccaatatcacagggtgtgtacacagggaggggcaagggccagaagcgggcgggaatccccatgtttgggcggacccagtttctaatggccagcatttgccaatcaaagcttaccagagaactctaaaagccagggctttcctgctagacaagactcatttctggaactgctttaaaaagaaacaaaacttcccaaggaccccttttcctctctgtctgcctaaaataatgttttaaaaactcctaaagcagctgaattcagcccccttcctgggggaatgtatagacggaactcccacctttcccggcatcccaaggccagagtatgtgaaactcctgggtctctatgtgtgtctgagcggctgctctgccaacactccacacagccctgtgtcctggacccaaggcccttatgacctgagctcaagaggggatctcctgatccatgggttgcaaagatccatgggagaagcatggtttctggggcggggtcacacgctcagtcactgtttccctcggatgccggagatggttcctttggctctctgccaatacagggtgaatcatcatccatccctcttttctttgttctcccgggtcaagttgtttgcctagtcagtcccaatgtgagaacctgaatatttcagttgacgcgctgacttcaaaatccccgggcttcgggaggcggagcttgcagtgagccgagatcccgccactgcactccagcctgggcgacagagcgagactccgtctcaaaaaaaaaaaaaaaaaaaaaaaaaaaaaagtccccgggcttttcttttcactcagtggaaggcagctgcttctaattggccatcttggcccgcccccaccacgtgaccttctgtaaaatgcctccactctccaggaacgctctcattatataactttgcctgaaaccaacagcacgctcattgcacatatcatgggctcatttatttcacttataaagaacctggccaaggaagagatagtgcctaaagtggccagtattctgaccgatatgttagaaaaatggtgtgccgaccaattcatgacatgtgtcccaaaactagcaacggaaattgtattcgccgtgttgaggtctctaatccagatgatgctcatctatgtactggaaaaggcagagtcctttcctgacaagctgctgaaactcttcagaaacatctcatatttcctgaagaagatgatgtctggacaagcagcacaggtcgttcagatttaactttctattcatatatccagcacgatattcgcacaattgtcacgaaaccttaccagttgatgagtcctgcacatttcctttaatttcaggaggaagagggtaatccggatgagttttctgacctactctgctgctgtgattaaacaaccaccaggaaattttgacgacactgttctcctgagctcctccctttcctccgggaacaaaacaattgaatttacaaaaataaagtgttatttgactggagtgaggtctcatgtctgcttatgcggtggctcgctgctcagaacagggtgagtctctgggttgtgtgctgaggaggggaggctctcaatctggagaaaacccactgcaggggacacctccatggggtctgagggactgaggatgaggagccggactgggtctagggaaggaggaggtttcagagggtgaaattctggcactaaagcctgggggtgtttgggaacttcctccttccgaagaagtttcagggagggataaagacaaaccctgggctccttgaggggcccttactaatttgagaggactctatcgggaaggagagtgacaatggcctccttgaggactgaggcccctgaataaatgaggcccagatacagtccatgggggatgagaccttcaagggtcacattttggttgggacagaggaaaagtgcagctctgcagccgcagaggaaaacccggcagtgtgaaagcgaccttggaggggccctgtgcgctctgaatgcgtctgagcccccatcccctgtccccgcctctctttctggattcttccagctcggctgtctccgccatcttctgagcgctccaccctgacttattcaagtttcccttctgccttccaagtactccaaaatctttcagatctgtgtccctacccctgtttttagcatgtgttggggctccaggtccctgaaggtttctggcctgaaatccacctccccagcggagtggactgcgttctagagactccacactccgcgaggttcccaggcccctgagggacaaccgagtggcctgcgcacttcagggctccacactcggcaaggtctttcaagcccttggggtccccttcttagttttttccacctttctgggctgcagtcactccataaatgctgggatctgatccccacccccactctcgtttcctcaattctgcgggctacacgctctggcaaggtcctccgggccctggatcccctccctctccctatgcccacgctcctagtcagcccttctggggtccactattttcaggaactaaccgttctcatggagccttgctaaccggaaagctgtgtggaagaaaggctttgaggatagaggtggagatttggctcttccatagtgccactcacccaccccaccatgctgccactgccagacccggacccctgtttcagaacaagtgaccagattcgctcctggacagccctggacactggccttttctctgaaaactactcaccctttctctagtccccacttcatgccagcctcataccctcttccttcccccacgctggcttccgggatcctcctctgctcagacaacctcttctgtgtcccacccccgtttttagaatgctttggggcaccaggttgggggaaggtttctggcctgatatccatctctttccaaactcccttcttcccttgaaaggcttcttgccttcagccccacttctggctccgaggtttcaggacaccctcctcttcatcctcattcttttgaccaccagctttttaggaattcgaacgtccctctcatcttcgtgaatcctgtccaggcatttgttgaccccttcatctgatacccctgacctcacattgccaaaagtctacccctacccagtacactggaattagacaaaatcccaggagttttacctcaactctgagtgtgcccacaggagctctccctgaagccacgtccttttaagcagggtctagggttcctcccttgtcttaatgaactctttgtcacacggaggacgttatggagcccttatgatctttcactgcctttctgcccagcgttttgtctttccatggacatttataatattttccatggacattttgttctctcaatgtccacccctaatttccaacatcccaaagattctcatgtgtttcctgaaagccatttacaggaatggctgtgcccagacccccttccccaggatcctccttcacacctggtaggtgcctctcctagagagatttgcactcagttgtcgtgcagtcacatggcccagatggttgttaatcacccccttcctggcaacagctagcagccagggaatcactggcacagaaacctcagggtgaccaagatgaggccacctctgtgctgaaggctgtgctccagagcctgcttgggatcaggcttaagcaggtcttcagccagacctgatgttacctggtttccttgagctgccctgcctgagctatcgggagcactccctcaatgcacatcttgattccctatctcatgctctgcttctagaaaccatgagctatcaattgctactggcaatggtcctgggaagtcaaccctaagtatggattctggggttggatgactccccacaggacttcagtgagcaacaatcactgctggcagttggaggacagagtcgctagggcatgtgaccactgtgaaaccaccgatgtttcacctggggtaattttggatgaactacggtagaagcactgaaggtacattgcttttggtttggaagattgtaggtaaataatagcgatatgaatgtggaattggatggctgcaaacgagtgccattgatgcattgaaagaggaaaagtcaggctgtcacctgtcactcagcaatttaaagtgtgagagttgggactagatgtggtggctcacatctataatccagagattcgggggaagcttgaagaggtaggatcttttgagtccaggagttccagaccagcctggacaccagagcaagacctcatctctacaacaaaattttcttaaaaattagatgggcttggtggcacgcacctgtacttgtagatctagctaatggggagcatgagataaaaaaatcacctgagtcagggacttaggggttacaatgaggtatgattgtgccagtgcacacactcccacctggccaacagagtgagattctgcttccaaaaaaataagaaataaatcaggtttgagagttggaaagcatcatcttctcctagagccaaaggacatgtacaactgagacccaggaacaaagcttcatcacaaagagaccatcatcagtggagccgggagatgcattccccctcaccctgccttgaggaggcagtggagtcatctgtctgggatcctttctgacccagccctatttgtttgtctctttggcttctttggatttgtatattttagctgttataacactgtaaaacaaacagagtgatttttttgagttgtgtgaatgatgctagctccatagtcaccctgagagtgatgggaacttttgaatttgtggcaagttggagggtagtgtaagtgacctgagattgccaaattggggctagcactggatgtgaggttaggctagtggaaaaatatgcccagaaccagaggagtgtgggctcactgcaggtggttaggctcagatccaaattgtacagatggatagctttggggtaaagaataacatagttgagaagtgcatgtgttagtctgttcatgcactgctataaagaattacctgagactgggtaattatttataaaactcaggtttaattgggtcatggttccacaggctgtacaaaaagtatgatgctggccatcagctcaacttctggggaggccccagaatagttagagtcatggcaaaaagtacaagggaagcaggctcatcttccacggccagagctggagcaagtggtaggagaggtgatacacactttcaaacaagtaggtcttttgagaactccatcaccggacagcacctatgggatggtgctaaattattcatgaaatatccgcctccataatccactcaactgtcaccagcgcagccagccccacctccaacagtggggattacaattccatatgaggtgtgggtggggacacagctccaacctcaatcagtgggcatcctggattgggtctactatagaaggagaaccaggagctgactatgatcttgaaccctacccatgatggccgggcggggtgactcatgcctgtaaccccagcactttgggaggctgaggtgggtggatcgcctgaagtcaggagttagagaccagcctggccaacatggtgaaaacctgtctctactaaaaatacaaaaaattagaccggcgttgtgctggatgcctgtaatcacaccactacgctccagcatgggaaaaaataccaaaacttcgtctcaaaaaaaaaaaaaaaaaaaaaaaaaaaaagactgcccatgaccactgcaccagtgagagggacaccagcatcactgagatgcaagggctggacattcttcataggtcagagctcaaagcaggggacactgatacagagatgggctccatccatagcaccaaagtggtgagaggatgtgggaatggcagaggccagcactttgccatcaatgcaagggggtataaggaggtgacaccagtgccagagtacatcacggggggactgccctacaatatctaggacttacctcttagagcgtgtttcattagcgacaacagatataaatggcagacaggtgtgtccctgcattaacaggaaatagaaatcatcaagaggaacagaaggcagatgtcagcagccccttagaaagtcatcatccttcatacagttaaaatctgagacagttctcacacgagaaggcctaactcaaaaagaggctgggttctcatgaggcaggtttatgcaaaaccaaggaaggtgtacaagtttggaattctccagtttcccttggaaaagacctacagtcatttgcttaggtaactgagcactgaacaaaggtgagtattgttgtcttttagaagctcttggccaagaaggccttgttggcataaaacccatggtttggaaacatcaccatgacccctgttagagtaatggcctaagggtgggggtcaggaaattgatgtattccttgccaacttctgcctctaagtgagtgaactctgtttgtgaacctctctcctctgtggttatgttcctaggctctcatgtataatcaggagtcatagacttagaaacaggaaaaatacttacagtgtttttgtggcctgtgagctatgacttataattttaggaaaaaaacaattgcaaatggaaagcctaagtctatcaatgctcatccaagacaacataatcaataaaaaccaatatcaaatctcaaggcaaattatttcctgtatatagatggcagagatgagcaccaccatcaaaaactcaaggaccagtgctgtgggtccagtcatctgtttcatggaattcaccagtctggtatcttcaaaatccagaaggatgatggcagatggcaggaaagtaatgcaaacgtcatcaggtgtgaccccactgtagcagctgtgatggatgttttctctcaccatagcaataaataacacaacctcggtcacactgtatgcattgttggtctgcaaaatccatgttttgcaaaactcttcaggaaggtggatctgtaatattggcattgacatgagaacaacagcagtatttattcacaatctcaagctctctgtcttcccgtctctctcattagccatccaagtagtcctgaggaaccaagcccatcagaacattctgcaacataatacacagctccattctccattcaaattttgttgttgttgttgttgttgatgagacaacatcttactccatcagccaggctgacgtacagtggggctatctgggctgactgtagtcttgagcttccaggctcaaggcatcctctcacctcagcctcctaagtggcttgaactacagacacacagcgacatgctgggctagtttttgtatattttgtagagacgtgctctcaccatgttattcaggctggactcaaactcctgagcgtaagtgatccaagcaccttggcctcaaagtgctgagattacaagcctgagccactgcacccagcccaatctccattctactgataacaatgtcattaccaggtctgatggacaggaaatggtaaggtttctgaaaacctaaggatcacacagcgagttccaaaggctgaaagtgcatacctgtcgacactgataccaatgacatccaatggtgagaatgacattccttgtagtcctagctctgctcataacaaatctatactgaagtgtaagagtttgatggtcatggggattttccatgtctctgcctttcagcgatgtgccatatctgtgaagtgttcagaaatgcaacagcctgaggcatgctgggcatatcctctaataaaaaggaaaatgccattttatggtcctgtatttctacaagttggaacacatgggcctgtgatccagatgggggaaatgggaatattcccactcattcaccttcatccacgaagcccatttgaaagctttgggcttcccatccttgtagattttagtgttgtgggctgggtgcagtggctttcacctgtactgccaacactttgggaggcctagacaggtgaatccactgaggccaaaagttcgagaccagcctggccaagatggtgaaaccccgtccctactaaaaatacaaaaattagcaaggtattggggccagcacctgtaatcccagctgctcgggaggctgaggctggagaatcgcttgaacccaaaaggcagagactgcagtgacccgatcctgcctttgcactccacctgggcaagcagaacaaaacttctgtcttgaaaaaaaaaacaaaaaacgaacaaaaaagatgttagagttctgggtttagaggtctataccccagaaagagaatggtttcaacaagggacaaagaagttgctttaaacgttgacttgccatttcttttcagtgtgtttgttctcttgcgtcaagagaccaccagaaaagtggtgcaattactctcctgtcaagaatcattgactatcatctgcaagagggtcagatcctggtatataattagggcagaaatacttagtctgagaagggtatgacatccagaggccctattaatgatgtccttttctccatgcctgactctgaccccatgtgctggactgcccctgtgtggatggcctcatggcctgctcggactctgaggtcccaccccaagtggcacctccatggagggctctactcttgtatgggctctgacactcacactgagacactctcccatggacacctcttcacccacttggggtctgaaactgggctactccatccctccctaacctggaacagagagctttcactgctattacacaagtcatagaggctaactcctcatttttccaagctaattattgaaacattagtcctgggttgataagacaagataagttaacttttcataaatttgcttatcaagttttgaataaattcaaataaattcaccttccccacacaccttagttgtcgacatcacacgcgcacccatactcacagggtgagcacgaaggcttcactgtcagtggagaaagtggcaaaacccttctgtgcctcatcctggtctagacctggccctcatcctttcccactcttcccctcactcccttggattcatccacactggcctcctgcctgctgctccacctccctgcgaagctcacccctgcctcagggcctttgcacgtgcagtggcttcaagccatatcctcttcacccagatctcccagatctcctgaatgatcttcttttatcattcaggtctcagcttgcatgtaatcttctcagtgaggattacccaaaccacatagttcattcattcattcaaatattcattcaatggcatattgacaaagcagctacttcatgccaggccttgggccaggtgttatggatatggcaacaaacaaaacaagagttttctgctctcaaatttttacccacttaaaggagatatcatacatcatctgtaaataaatacatcatctgtaaataatgatgtaaataaatacatcatctgtaaatctgtaaataatgatgtaaataaatacatcatctgtaaataaataaagtataataaaagaaaatagtaggtttttttggttggaggtgaccgtgaagtttgcaaataccatcttacaacacattattttattttatttcatttcatttttaattttattattattatactttaagttttagggtacatgtgcacaacgtgcagatttgttacatatgtatacatgtgtgaagttggtgtgctgcacccattaactcgtcatttagcattaggtatatctcctaatgctatccttcccccctcccccaccccacaacagtccccggtgtgtgatgttccccttcctgtgtccatgtgttctcattgttcagttcccccctatgagtgagaacatgcggtatttggttttttgtccttgtgatagtttgctgagaatgatggtttccagcttcatccatgtccctacaaaggacacgaactcatcattttttatggctgcatagtattccatggtgtatatgtgccacattttcttcatccagtctatcattgttggatatttgggttggttccaagtctttgctattgtgaagagtgccgcaataaacatacgtgtgcgtgtgtctttatagcagcatgatttataatcctttgggtatatacccagtaatgggatggctgggtcaaatggtatttctagctctagatcactgaggaatcgccacactgacttccacagtggttgaactagtttacagtcccaccaacagtgtaaaagtgttcctatttctccacatcctctccagcacctgttgtttcctgactttttaatgatcgccattctaactggtgtgagatggtatctcactgtggctttgatttgcatttctctgatggccagtgatgatgagcatttcttcatgtgttttttggctgcataaatgtcttcttttgagaaatgtctgttcatatccttcacccactttttgatggggttgtttgtttttttcttgtaaatttgtttgagttcattgtagattctggatattagccctttgtcagatgagtaggttgtgaaaattttctcccattctgcaggttacctgttcactctgatggtagtttcttttgctgtgcagaagctctttagtttaattagatcccatttgtcaattttggcttttgttgccattgcttttggtgttttagacatgaagtccttgcccgtgcctatgacctgaatggaaatgcctgggttttcttctagggtttttatggtttgaggtctaacatgtaagtctttaatccatcttgaattaatttttgtataaggtgtaaggaagggatccagtttcacctttctacatatggctagcctgttttcccagaaccatttattaaatagggaatcctttccccacttcttgtttttgtcaggtgtgtcaaagatcagatagttgtagatatgtgacattatttctgaggactctgttctgttgcattggtctatatctctgttttggtaccagtaccatgctgttttggttactgtagccttgtagtatagtttgaagtcaggtagcatgatgcctccagctttgctcttttggcttaggattgactttgcaatgcggggtcttttttggttccatgtgaactttaaagtagttttttccaattctgtgaagaaagtcattggtagcttgatggggatggcattgaatctataaattaccttgggcagtatggccattttcacgatattgattcttcctacccatgagcatggaatgttcttccatttgtttgtatcctcttttatttcattgagcagtggttttagttctccttgaagaggtccttcacatcccttgtaagttgggttcctaggtattttattccctttgaagcaattgtgaatgggagttcactcatgatttggctctctgtttgtctgttattggtgtataagaatgcttgtgatttttgtacattgattttgtatcctgagactttgctgaagttgcttatcagcttaaggagattttgggctgagacaatgggttttctagatatacaatcatgtcgtctgcaaacagggacaatttgacttcctcttttcctaattgaataccctttatttccttctcctgcctaattgccctggccagaacttccaacactatgttgaataggagtggtgagagagggcatccctgtcttgtgccagttttcaaagggaatgcttccagtttttgcccattcagtatgatattggctgtgggtttgtcatagatagctcttattattttgagatatgtcccatcaatacctaattattgagagttttcagcatgaagggttgttgaattttgtcaaaggccttttctgcatctattgagataatcatgtggtttttgtctttgggtctgtttatatgctggattacatttattgatttgcatatattgaaccagccttgcatcccagggatgaagcccacttgatcatggtggataagctttttgatgtgctgctggattcggtttgccagtattttactgaggacttttgcatcaatgttcatcaaggatattggtctaaaattctcttttttggttgtgtctctgcctggctttggtatcaggatgatgctggcctcataaaatgagttagggaggattccctctttttctattgattggaatagtttcaggaggaatggtaccagttcctccttgtacctctggtagaattgggctgtgaatccatctggtcctggactgtttttggttggtaagctattgattattgccacaatttcagatcctgttattgctctattcagagattcaacttcttcctggtttagtcttgggaaggtgtatgtgtccaggaatttatccatttcttctagattttctagtttatttgcgtagaggtgtttgtagtattctctgatggtagtttgtatttctgtgggatcagtggtgatatcacctttatcattttttattgcatctatttgattcttctctctttttttctttattagtcttgctaccggtctatcaattttgttgatccttttaaaaaaccagctcctggattcattaattttttgaagggttttttgtgtctctatttccttcagttctgctctgattttagttatttcttgccttctgctagcttttgaatgtgtttgctcttgcttttctagttcttttaattgtgatgttagggtgtcaattttggatctttcctgctttctcttgtgggcatttagtgttataaatttccctctacacactgctttgaatgtgtcccagagattgtggtatgttgtgtcttttttctcgttggtttcaaagaacatctttatttctgccttcattttgttatgtacccagtagtcattcaggagcaggttgttcagtttccatgtagttgagcggttttgagtgagtttcttaatcctgagttctagtttgattgcactgtggtctgagagacagtttgttataatttctgttcttttacatttgctgaggagagctttacttccaagtatgtggtcaattttggaataggtgtggtgtgatgctgaaaaaaatgtatattctgttgatttggggtggagagttctgtagatgtctattaggtccgcttggtgcagagctgagttcaaatcctgggtatccttgttaactttctgtctcattgatctgtctaatgttgacagtggggtgttaaagtctcccattattattgtgtgggagtctaagtctctttgtaggtcactcaggacttgctttatgaatctgggtgctcctgtattgggtgcatatatatttaggatagttagctcttcttgttgaattgatccctttaccattatgtaatggccttttttgtctcttacgatatttgttggtttaaagcctgttttatcagagactaggattgcaacacctgcctttttttgttttccattttcttggtagatcttcctccatccctttattttgagcttatgtgtgtctctgcacgtgagatgggtttcctgaatacagcacactgatgggtcttgactctttatccaatttgccagtctgtgtcttttaattggagcatttagcccatttacatttaaggttaatattgttatgtgtgaatttgatcctgtcgttatgatgttagctggttattttgctcattggttgatgcggtttcttcctagccttgatggtctttacaatttggcatgtttttgcagtggctggtactgactgttcctttccatgtttagcgcttccttcaggagctcttttagggcaggtctggtggtgacaaaatccctcagcatttgcttgtctgtaaaggattttatttctccttcacttatgaagcttagtttggctggatatgaaattctgggttgaaaattcttttctttaagaatgttgaatattggcccccactgtcttctggcttctagagtttctgccaagagatcagccgttagtctgatgggcttccctttgtgggtaacccgacctttctctctggctgcccttaacattttttccttcatttcaactttggtgaatctgacaattatgtgtcttggagttgctcttcttgaggagtatctttgtggcattctctgtatttcctgaatttgaatgttggcctgccttgctaggttgcagaagttctcctgggtaatatcctgaagagtgttttccagcttggttccattctccccatcactttcaggtacactaatcaaacgtagatttaatcttttcacatagttccatatttcttggaggctttgtttgtttctttttactctctttcctctaaacttctcttctcacttcatttcattaatttgatcttcattcacttatatactttcttccacttcatcaaatcggctactgaaggtattgcatgcatcatgtagttctcatgccatggttttcagctctatcaggtcatttaaggtcttctgtacattgttttctctacttagccattcgtctaatcttttttcaaggtttttagcttccttgtgatgggtttgaacatcccctttagctcagagatgtttgttattactgaccttctgaagcctgcttctgtcaacttgtcaaagtcattctccatccagctttgttccattgctggtgaggagctgcgatcctttggaggagaagaggtgctctggtttatagaattttcagcttttctgctctggtttctccccatctttgtggttttatctacctttggtctttgataatggtgacctagagatggggttttggtgtggatgtcctttttgttgatgttgatgctgttcctttctgtttgttagttttccttcgaacagtcaggttcctcagctgcaggtctgttggagtttgccggaggtccactccagaccctgtttgcctgggtatcaccagcggaggctgcagaatagcaaatattgcacaacagcaaatattgctgcctgatccttcctctggaagcttcgtctcaaaggggtgcctggctgtatgaggtgtcagttggcccctactgggaggtgtctcccagttaggctagatgggggttagggacccacttgagaaggcagcctgtccattcacagagctcaaacactatgctaggagagccactgctctcttcagtgctgtcagatggggatgtttaagtctgcagaaatttctgctgccttttattcagctatgccctgcccctacagatggagtctacagaggcaggcaggcctcattgagctgcggtgggctcctcccagttcgagcttccagaccactttgtttacctactgaagcctcagaaatggtgaacacccctcccccacccagtctgccgccttgcagttccatctcagactgctgtgctagcagtgagcgaggctccatgggcgtgggacccactgagccaggcacaggatataatctcctggtgtgccatttgctaagaccattggaaaagcacagtattaaggtgggagtgtcccaattttcccagtacagtctgtcacgggttccctcatctaggaaaggtaaatcccctaaccccttgtgcttcccggtgacgcaatgccccaccctgcttcagctagccctccatgggctgcatccactgtccaaccagcccaatgagatgaacaaggtacctcagttggaaatgcagaaatcacccatcttctgtgtggatcaggctgggagctgcagaccggagttgctcctattcggccatcttggaatggcaatctatgtttgctttttacatttgaaaaaactggtgtcacgtacctaggtattaatcattgtggtatcctcttgccgatttacctctttatcattaactagtgaccctccttgtcttttgttgttacagtctgtgattttagtctattttatctaatatgagaatagctactctggcacttttttggtttccagcttcatgaaatatccttttccatttccctgttttcatttccctttcggtgtctctatagatgaagttgatttctttaaggcaccataagttgggtcttatttctttatccatttgaccatttagagaatttagaacactgtcagtgttattattcataagtaaaaacttaagagtgggtgtagtggtgtacatctgtatttcctgcactttgagagactgaggcgagctgatctcctggggtcaggagtttgagaccggcctggtcaacatgatgaaaccctgtctctactaaaaatacaaaaattagccaagcatgctggcatgtgcctgtaatccaatttacttgggaggctgaggcaggagaagcttgaacctgggagacaaatgttgcagtgagctgagatcacacagagaagtcatctccactctcctcatcagaacctcttgttcacagcatttgtgagcacaaatcaatgatggttattctttcctactaattagggatattttattacacagcaatagcctccagcaaagggaaccatcatacatgattcctacaagttgacagggctggaattatcactgaaaaactaaggtggctatacttgattcccaatgtccaatttttcatgaatagagaaatttatcctttttccccccagccagaaaccaagttttgctcttacgcccaggctggaatcaagtggcacaatctcagctcactgcaacctctgccccccagcttcaagaaattcaccttttgaacaaggagatattaaggatacactatgtgtatgctaccggtggttgcaggagactcagaaaagagagaaacagtcactggcctcgtgcaactgatattctcgggaggagagaaaggcaatcaagaaagaaacatgctgtatttcagacagctgtaagtcctccacaagaaaagaaagcaggtgaggaacataggaaatgtgtcaaccataaggttcccgctaattctataagttggtcagggatatcctccaagaataagcagcatctgagcaatcacctgaagggaggaaggaaggaagactgtgagtggtggcttacacctgtaatcccagcactttgggaggccaaggagggcagattgcctgagctcaggagttcacgaccactcagagcaacctgttgatacccaatctctactaaaaacacacaaaaaaattacccgggtgtggtggcacgcacctgtagtcccagcttccatgcccagctgatttctctctctccatatatatatatatatacacatatattgtttttgcagagatagggtctcactgtgtcacccagtcatcaagcaattctcttatactgttttggaaaagcatgggaattacaggtgtgaaataccctgctggtcctgaaaaatgtgatatttgggattctctgcctggcttgttttacccaaaataatgacctccagttccttccaggttgctgcaaaagacatgattttcactgttttataactgaatagtattcctgtatgtatacataccacattttctttatttattcttctgttgattgacatgtagggtgattccatgtctttgctactgtaaataatgctgcagcaaatatttgtgtgcattttgatctattcctttgagtaggtacccagtactgcaactgcaggactgagtagttgttatattttttgttctttcagaaatctccatagtgtttgccataaaatctgcactaatttacattcccaacaacaatgcataagatttccccttttctccacattctcactaacatttgttatgtttttgtctttttcataatacccattctgactggagtaagatatctcattgtggtggttgttgatatttttgagacggggtctcactctgttgccagactggagtgcagtggtgtgatcgtggcttgctgcaacctccacctcccgggttcaagcaattctcctgcctcagcctcccgagtagctgggactacaggcgcgtgccaacaggcctggctcattttttgtatttttagtaaagacagggtttcaccatgttggccaggatgatcacagtctcttgagctcatcatacacctgcctcagcctcccaaagtgttggaattacagtcatgaggcagcgcacccaacctcaatgtggttttaatgaccatttctctgacgattcatggtgtggagaatttctttgaaataccttttggccatttatatgtgctcttttaaaaactgactcctgtccaggtgcggttgagcatgcctgtaaccccagaacttcgggaggctgaggccaatggatcacttgaggcaaagaggcagaaatcagcctggccaacaaggcaaaaccccatctttactaaaaatacaaaaaatcagccacgggctgtgactcgtgcctgtggtgcaagttactcaggaggttaaggcacaggaattgcttgaacccggtaggcacaggtcacagtgagccaagatcatggcactgcactacagcatgggtaatagagaaagacctgtctcataaaaacaaatgaataaataaataagataaaaaataaaaaagtctctttatgtcctttgccgactttttaatgggattctttggagttttctgttgtagttgagatctttgtttactctcggtattagtcttttgtcaaaggaaaagtttacaaataatttcttccgttctgcagtttgtctgctcactctgttgagaggattatttctttggctgtgcagcagctttttgtttcagtaaagcttttgaatttatataattaaaattttcagtttggtttaaatttgcactggtcgatttttggttttgttgcctgtacttttgaagtcatactcttgaactctttactagacaataaccagaagagttttctctagttttcttctcacatttttattatttcagtacatatatttaagtctataattcatcttcaattgatttttgtagaaatagtgagaaataggagtccaggtttattcttctgcaaatgacaattcaattgttccagcaccaattattgaaaagggtgtgctttcctcaacgtatattcttatcagctttgtcaaagatcagttggctataaatgtgtggctttctttctgggctctctagtctgttacatcaatctgtgtgtctatctgtatactactaccatgctgtattggtgatgatggctttgtaatataatttgaagtcaagaaatgtgatgctcccagctttgtttatttgcttcagaaaggctgagtcaacagctgcagagatgaagctgcccctcctcgcagggctccttcccggaaaaagatcatggctcccactgaccatataaccatggctggaactcctgaaattcccaaagggaggccctacccagtgaggggggatgaatgaaggtcctacttaaggaatctgtctggccacaatcaggcacagcagctgtgctgccttgtgggggaccagaccacctggattccctggagcctgcaggctagaatgtctgagtccatggaaacacagaaatggaggccgccctcacctccccagaaaactgtagtctcaggcagtctccagccgattgccactggttggctgctattccaagccagtgggtcttaacttgagaggtgctgtggaagtggggcccacggaatgaggctgcttggctccctggattcagccccttttctaagggaatgtacagatggaactcccgccttgcccagctttccaagtatataaaactcctgagtctctgtgagtgtctgagcgagtgctctggcaacattcgacacggctctgtgtatctgacccaagacccttatggcatgagctaatgggaggatcttctgatccatgcgtggcaaagatgcatgggagaaacatggtttgtgggtaggggttgtgcattcactactgcttctcttggctgtaggtgaaggtttctttggctctgtgctgatactgggtgcaccatcacccaccccctttgtttcttctcctgggtcaagtcatttgcctaatcagtcccaatgtaggaacctggatacttcagttcaaggtgctgaattcaccgtgcttttcattcaggggaagacagctgcttctcattgggcatcttggcctgcccacttcacgtcactttttgtaaaatccacaccactccaggaatatccattacttaacttcgcctgaaataaacagaaggctcattacacttatcatgggctcacttacttcgcctataatgaaggtgccatggaaatgctagtggatgacgtggtccattttcttagggatgagatagaaaaatggtgtatggctttttaatttaattaaaatttttagtttggtttaaatttacattggtctctttttggttttgttgcctgtacttttgaagtcttactcgtgaactctttactggacaatgaccagaagagttttccctaagtttcttctgatattttgaccatttcagtacatacatttcagtctataattcactttaaattgatttttgtaaacatggtaagaaataggagttcagatttattcttccgcatatgataatgcaactgtcccagtaccaattattgaaaagggtgtgctttccctagtgtatattcttgtcagctttgtcaaagatcagttgcctatgaatgtgtggctttcattttggattctctcgtctgttacatcaatctgtgtgtccacatttatacctgtaccatgctgtattggtgactatggctgtgtaatatattttagagttaggaaatgtgatgctcccagctttgttcatttgcttcagctgaaaaggttgagtccacaattacaaagatggcagccgcccatccccggaggacctccaacccagaaagagatcaggcttcccaccaaccctataaccctggctggagttcctgaaattccaacagggaggaccttcccagtgaggagggatgaatcaaggtcaaatttaaagaaacagtctggccactatcaggcacagcagcagtgctgccttgtgggggacccctcctgctccagaccagctgccctccctggagcccgaaggctagattgtctgagtctacggaaacagagacggtggccgccccaaccacccagaactcggtagtctcaggcacttggcttgctatcttgccactgcttggctggtattccaagcccgtgggacttgagaagtgctgtgatgatggggaccacaggatgaggctgtctggctccctgtgatatggctgtgatgagtggaggaacaccagggctcatgtctcacacagaattggagaaaatgacacaaacacatgtacagtggttttatggcgtgcagtttaataggcaagaacgaaggaagagctccccatactgagacagagggaggggggctccaaagccaaaagaggaaacccggagtgctgtggataccaatgagttatatgaagaaactggagggggcggtgtctgatttgcatagggttcaggcgattggttcgaccaggcatgtcatttatgtggcccacggaaaaactggccctcccacctagcctttgaatatgcacgtgccggacaccctgatttcctacactcatggggatatatgggggtggccatatcgccaggcacaggtggggacaagggccagaagagggcgggaatcgctatgtttgggtggacccagtttctaatggccggcatctgcagatcaaggttaccggagaactctaaaagccggggctttcctgctagacaagactcatttctggagctgctttaaaaagaaacaaaacttcccaaggaccccttttcctccctgtctgcccaaaataatttcttaacaactcgtataacacctgaattcagcccccttactgggggaatgtaccaacggaactcccacctttcctggtttctcaaggctagattgtgtaaacctcctgggtctcggtctgtgtctgagcagctgctctgccaacactccacacagccctgtgtactaggcccaaggccgccgtgactcagcccatgggaggatctcctgatttcttggttgcaaagatccatgggagaaaaatggtttctggggcggggtcacacactcatggcttctcttggctgtgcaagaaggttcctttggctctgttccaatatagcgtggttcatcacccacccctgttttctttgttctcctgagtcaagttgtttgcctagtcagtcccaatgtgagaacctgaatatttcagttcacgtgcttatcgtgaaattcactgagactttaattcagtggaaggcagcctcttctaattggccatcttggcccgccccctccacgtcacctcccataaaatggccacgctctccagggacgatgccattatatatctttacgtgaaaccgacagaacacttattacactttttgtgagctcatttacttcacttataatgaacatggccatggaaatgctagtggagaaagtggtcgattttctgatggatgtgataaaaaaatggtttgccgaccaattaatgacatatgtctcaaaactagtaacgagacccttaatcgctgggttgaagtttctaatcaagaagatgctcatctatgtattcaacaaagcagcttcccttgcttctgaaatgcttccaaacaacatctcatatttcctgaagaagataatgcctggacaagcagcacaagtcattcaggtttactttcagctcataaatccagcaggatattcgcacaattgttgggaaaccttatcagttcatgagtcgtgcatgtttcctttaatttcaggaggaagagggtaatctggaagagtttcctgacctactctgctgctgtgattaaacaaccaccaggaaattttgatgacactgttctcctgagctcctccctttcctcggggaagaaaagcattgaaactacaaaaataaagtgttatttggctggagtgaggtctcatgtctgcttatgcggtggctcgctgctcagaacagggtgagtctctgagttgtacgctgaggaggggaggctgtcaatctagaaaaaacccattgcatgggacacctccatggggtctggggggctgaggatgaggagctggactggatctagggaaggaggaggtttcagagggtgaaattctggcagtaaatcctgggggtgtttgaaaacttcctccctcagaaggagaagactcagggaggaataaggacaaaccatgggtcccttgaggggcatttactaacttaagaggactttatcgggaagcagagtgacaatggcctccttgaggactgaggcccctggataaatgaggcccagatccagatccagtccatgggagatgagaccttcaagggacatatttttgttgggacagaggaaaagtgcagctctgcagctgcagaggaagccttggcagtgtgaaagcgaccttggagggggccctgtgcgttctgaatgcttctgaggtccatcccctgtccccgcctctttttctggattttttgggctccatggtctccgccatcttctgagcgctccacgctgccaccttcagttttctcttctgggctccaaatactccaaaatctttcatatctgtgcccctacccctgtttttagcatgtgttgggactccaggtccctgaaggtttctggcctgaaatccacctccccagcggtgtggattctgctctagagaccccgcacttggcaaggttcccaggcccctgggggacaaccgagtggtatgtgcacttcagggctccacactcggcaaggtctttcaagcccttggggttccctcctcagttttcttcacatgtctgggatgtagtcactctataaatgccgggatgtgatccccaccccagtgattttttttagttccatgagtgttgctatctgaatagtcatcctgagagtgatgggaccttttgaatttgcagcaagttttagattagtgtgagtggcctgagatcgcaaaactggggctagcattggatgtgaggttaggctggtggaaaaatttgcccagaacctgaggagtgtgggctcactgcaggtggttaggatcagcacagaattgcaaggatgtatagctttggggtaaagaataacatggttcagaagtacatgtattagtcttttcatgcattgctataaagaattacctgagactgggtaattaattataaaaactcaggtttaattggctcatggttccacaggctgtacaaaaaggatgatgctggccatcagctcaacttctggggaggcgtcagaaaacttagagtcatggcaaaaagcacaagggaatcaggctcatcctccatggccagagctggagctagtggtaggagaggtgctgcacacttttgaacaatcagatctttttagaactctatcaccagacagcacctagaggatggtgctaaattattcatgaaatatccacccatatgatccactcaattctcaccggcccaaccaggaccacctccaccattggggattacaattacacatgagatgtgggtggggacacagatccaaactcgatcagtgggcatcttggactgggtctactatagaagaagaaccaggagctgactatcatccttaagactgcccatgatggccaggcagggtggctcatgcctgtaatcccagcactttgggaagccaaggtgggtgaatcccctgaggtcaggagtttgagaccagcctcgccaacatggtgaaaccctgcctctactaaaaacacaaaaaattagatgggtgttgtgccagacgcctgtaatcacagctactccagaggctgaggcatgagaattgcttgaacctgggaggcggaggtggcggtgagccccaatcgcactgctacactccagcatgggcaacaataccaaaacatcgtctcaaaaaaaaaaaaaaaaaaaaaaaaggctgcccatgaccactgccccagtgagagggacaccagcatggctaagatcaagtgctggacattcttcatgggtcagacattaaagcaggccacactgttacagagatgggctccattcatagcaacaaagtggtgagaagatgtgggaatggcagaggccagcactttgccatcaatgcaaggtgggcataaggagctggcaccagtgccagagtgcatcaggggaggactgctttgcaatatctagcacttacctcttagagtatgtttcattagggacaacagatataaatggcagacaagtgagtcccttcagtaacaggaaatagaaatcatcaagaggaacagaaacagatgtcagcagccctcatataaagtcatcatccttcatccagttaaaacctgagacagttctcacataagaaggtctaattcaaaaagagactgggttctcatgaggcaggttcatgcaaaaccaagggaagtatacaactttgggattctccagcttcccttggaaaagacctacaatcatttgcttaggtaactgagcactgaacaaaggtgagtattgttatctttcagaagctgttggccatgaaggtcttgctggcataaaacccatggttggaaacatcaccatgacccctgttagagtaatggcctaagggcaagggtcaggaaattgatgtattccttgccaacttctgcgagacgagtgttggtccactcatctctttcacggaattcaccagtctggtatcttcaaaatccagaaggatgatggcagatggcaggaaactaatgcaaacaccatcagttgtacctccactgtagcagcagtaatggatgttatctcttcattgtaatatccagggagggagaagatgacattattctcaatattctaaacaccctgtgtgtacagcctctgtgatattttttgtaatatccgtgtgggagagaattatattactcctaatatctcaggggttgtgccccctctgtgacaatgttcctaacacccaggaggggataggatgatatcacttttagcatcacagggggtgtacaccccactgtaatattgttcataatatccgggggggagagaatgatattactcccaatatcgcaaagactgtacaccaacctgtgatattatttgtaatatccataagaggaagaataatattactcccaatgtcacaggaagtgtacacccttctgtgatattgttcaaaagatccagttagggaggggatgatattactctcaatatcttaaacaccctgtaggtaagccctctgtgatattcctcataatatccagagggagaggatgatattactcccaatattgcatgaagtctacaccccacctgtgatattgttcctaatatccaggatgggagaggatgatattactcccaatgtcgcaggggatgtacaccttccctgtaatattgttcgtaatatctagaaaaggagaggataatattactttcaacatcgcagggggtgtacaccttccttgttatattgttgctaatatccagggaaaaagaagatgacattaccaccactattgcagaaggtgtacacccccccttgatatagttcctaatatccagaaaaggagaggagatattactccaaatattgcaagaggtgtacattcccctgtaatatttttcctaacattcaggaagaaagagagtgatattgcccttaatattgaagggagtgtgccccccccgtgatattgtttctaatatccaagaaatgaaaggatgatattactcccaatatcacaggggctgtacagccccctcccatgatattgttcccaacatcggggggggggtgaaatagtattattcccagtatcacaataggtgtacacacctgtcgtgatattgttcctaatacccatgggggaaaggacgatattattcttaatatctcagagggatgtacaccctccctgtgatattgttcctaatatccggggtgggagaggatgatattacccccaaaatctcaaagggtgtacacccctcttgtgatattgttcctaatatccagggtggagaggataatattattcccaatatccaggaaaggaaacgatgatgttactgtgaatattccagggggtgtcctcccctctgtgatattgttcctaatatccaggttggggagattatgatatttctccaaatatcacaaggggtgtacaccaaccctgtgttattgttcctaatatcgatggggggagaggacgatattactcccaatatcacagggggtgtacaccacctttatgatattgttcctaatatccatgaagaaagaggatgatattactttcaatatcgcaggggatgtacactccccctgtgatattgttagtaatacctaggagaagaaagtgtgatattactcccaatatcgcaggggatgtacacgcttcctgtgatattgttcctaatatttagggggaaaggggatgatattactcccaatatcgaatggtgtgtacacccccccgtgattctttttttttttttttttttttttttgagatggagtcttgctctgccgcccagactggcgtgcaatggcgcaatctcggctcactgcaacatttgcctcccaggttcgcacgattctcctgcctcagccttcggagtagctgggattataggcagctgtcaccataccaggctaatttttgtatttttagtagagttggggtttcaccatgttggtcaggctggtcttgaattcctgacctcaaataatccacccaccttggcctcccaaagtcctgggattacaggcataactttccctgtgatattcttcctaatattcaggaagaaagaggatgatattgctcccaatatcgcagagagtgtgcactcctcctgtgatatggttcttaatattcagaggaggagaggatgatattactttctatattgcagaaggtgtacacctccctcgtgatgtctttcctaatatccagtgggggagaggttattagtctcaaaatcacagaaggtgtaaacccccatttgatattgttcctaatattcaggggtggggagagaaaggtattactcctagtatttcagggcatgaacacccccaccgtgatatcattcctaatatccagaaggggaggcaatgatatttctcctaatatcacaaagggtgtacaccccttctgtgatattgtaaatattctgtgtgtacacccccctgtgttatagtctgtaatatccgggtgggggagagggtgatatttctccccatattgtaggggatgtacacccttctgtgatatggttcgttatatccagggaagaaaaaggtaatattgctgcccatattgtggagagtgtacacccccatgtaatatggttcgtaatatccaggagtggagagggtgatactgctccttacatcgaggaaggtgtacaccttattgttatatgattcgcaatatccaggggaggagagagtgatattgctccccatgtcgcagggggtgtaaaccctccgtgatatgattggtaatatccaggaaaggaaagggtgatatttctccccatatcgcgggggacgtacatcctcctgtgatatggttcgtaatatccaggaggaaagaggaaaatattgctcttcataacccgaggggtgtacaacccctgtgatatggttcgtaatacccagaagtgtacacccctctgtgatatggtttgtaatatccagggggttagagggtgatattgctccccatatcgcagtgggggtacacccccctggattggttcataatattcatggggggagaaatttacatttatcctcatatcagggggggtgtacaccccccgtgatatggttcgtaatatccaggggaagaaagggtgatattgctccttatatcgcggaaggatcaccctcccctgtgatatggttcataatacccagacgggaagagggtgatattgttcttcataaagcgaagggtgtacagccccctgtgatatggttcataatatgcaaaaggggagagggtgatattgctccccatatcacggagggtgtactcccttctttgatatggttcgtaatatccaggggtgtagatggtgatatagctcgccctattggggagggtgttcacccctctgtgatattgttcgtaatgtccagggaaagagaggatgatattactcccaatatcgcagaaggtttacaccactctgtgatattgttcataatatccagggaaggagaagacgatattactcccaatatggcagggggtgtagaactcctgtgatattgtttgtaatatccaggcaaggagaggatattactctcaatatcgcagaaggtttacacccctatgtgatactgttcatgatatccagggaaaaagaggatattactccctatatcacaaagggtgtacacccctttgtgatattttttgtaatatccaggggagagaggataatattactctcaatatcagaaggggtgaaaaccctcctgtgtcattgttcataatatttagggaaggagagagtgatattactccaaatatcacagtgggtgtacacccccctatgatattgttcctaatttccagaaggggagatatgatattattgccaatatcgcagaaggtgtacaccttactctgacattgtttgtaatatccagatggggaaatgatgatattactcctaatatcacagggggtgtacacccccttgttttattgtttgtaatattcaggggaagagacgattatattactcccaatatcgcagggtgtgtacaacactctatgatattgttcataatatccaggggaggagaggaagtgtacacccccccgtgatattgttcgtaatatccagaggtagagaggatgatattactcccaatattgcaggtggtgtacacctttctgtgatattgtcatgatattaagaaggggagaggatgatattactaacaatatcacaaaaactgtacactccctgtgatattgttcataatatccagaagaagggaggatgatattattctgaatctcgcagaagatatacaccaccctgtgatatggttcataatatcctaggggaaagaggatgacataactgtcaatatcgcagggggtgtacaattccctgtgatattgttcacaatattcagagggaaaaaggataatattactttcaatatcgcaggcggtgtacacattactgtgttattgtttataatatccggaatgagagaaaattttctcccaatatcacaggaggtgtacactcccctgtgatattgttcgtaatatccagggaggggagaggatactattactcccaacatctcagggagtgtaggccccccctttgatattgttcctaatattcggaagtggagaagatgatattacttccaaaatcgcagggggtgtacactccctctgtaatattgtttctaatattcatgagtggaaagaaagatattactcccagtattgcaggggacatacaccacactgtgatcttgttcacaatattcgggggggagaggatgatattactcccaatatcaaagtaggtgtacacccccttctgatattgatcgtaatatccagaattaaagatgataacgttactcccaatattgcagggggtgtacatttttgaatactgttcataatattaagagggggaggggatgatatctgtcccaatatcgcaaagtgtgtacacctcctgtgacattgtcccaaatatccagaggaaaaaaggatgttattactcttaatatctcagagagtgtacacctccctgtgatattgtttgtaacatccagaagaaagaggctgatattactcttaatatcgcagggggtgtacacccccgccccgggatattattcgtaatatccagggggaagtggaatgttcagaatgggagaggatgatattacttgcaatatcatagtgggtgtacaccccactgtgatattgtttgtaatatccgggaaaggagaaaatgacattcctccccatatggcaggggctgtacaccacctatcatattgttcaaaatatccagaaggggagaggatatgtctccaagtatcacagggggtgtacaccccgctgtaatattcttcctaatatccagggtgtgagaggataatagtactcccaatatcccagggcatgtacaccccccttgtgatgttgttcctaaaattcatggggagaaagaatattactcccaatatcacagggggtgtacatacactctgtaatattgttgccaatatgcagcaggagagaggatgatattactcccaatatcacaggggctgtacaccccgctgggatattgtttctaatatcaagggggaaaaaggatgatattactcccaatgtcgcagggtgtgtacttcctctttgtgacattgttcctaatatccaggagagaagagggtgacattccttccaaaactgaaaggggtgtacacaccctttgagatattgtctttaatatccagaacgaaacaggatgatataactcctaatactgcaggggggtacaccctctctgtgatactgtttctaatatccaggaggggaaagaaaaatattaatcccaatatcacagggggtgtacattccccctttaatattgttcctaatatccaggaagacacaggatgatactatttccagcagcacagggcatgtacacccctttgtgatattgttcctaatatccaggaaaagagaggatgatattactgtcaatattgcagggcgtatacactggttctgtgatattgtttctaatatccgggggtggagaaaatgatattactcccaatattccagcgggtgtacacccgttctatgatattgttcctaatatctgggggagagagaatgatattattgtcaatatcacaggggatgtacagattccctgtgatattgtttctaatattcacagggggagaagggtataatactcccgatatcgcagggggtgtacactccccctgtgaagttgttcctaatatccagggattgagagaatgatattactcccaatatcacaggcggtgtaaaccccctgtgtgatattgttcctaacatccagaggaaaagatgatgatattattttcaatatcacagggggtgtacgcatccctgtgatattgtttctaatatccaggggaggagaggatgatattattgttaatatcgcagggggtgtaccccaccctgtgatactgttcctaatatccggggtggaagaggataatattgctcccaatatcgcaaagggtgtacaaccttcctgagatattggtcctaatatccagggagggagaggatgatattactttcaatatcacagggagtttacacaacccctgcgatattgttcctaatatccagcggaagaagagttaggataatactattttcaaaattgctgggtctgtaccccctccccgtgatattgtttctaatatccaggaggggagaaagtaatatgactcccaatatcttagaagatgtacaccctccccataatattatttcttacatccagggggtagaggatgattttgctttcaatatcacagagggagtaaacctttccggtgatattgtttttaatatttaaaaagagagaagataaaattactcccaatacaaaggggatgtattgtgtactcccccctctgatattcttttttaatatccagatggagagaggatgatattactttcaatattgcatgggatgtataaatcccctgtgttattgttctgaatatacaggtggggagagtatgatattactccaaatatcgcagggggttctttccccctgtgatattgttcctaacattcagggagggagaggatgatattactcttaatattgcagggggtgtacccacgcctatgatattgttcctaatatccagagggggagaggatgatctaactcagaatatgacaaggggtgtacacacagcctgtgatatggttcctaatatacaggggagaaggggataatatttctcccaatatcgcagggggtgtacaaccccctgtgatactgttcctaatatacagaaggggacagcatgatattgttcctaatatcgcaggaggtgtacaacgccctgtgatattgttcctaatatccagggcgggagaggatgatattaccctcaatatcgcagggggtgtgcactttccctgttatattgttcctatgatccgggtggggggaaatgacattagtcccaatatcgcaggatgtgtgcaccgctcccccgtgatattgttcctaatatcaagggggagagaggaggatattactcccaatatcgcaagggatgtacatcctccatgcgatattgttcgtaatattcaggaggagagaggatgatattactcttaatatcgcagaaagtggacacccaccctgtgatgttcttcataatatccagggaagcagacgattatatgactttcaatatcgctgggagtgtacatcccttttgggatattgtttctaatatccaggaagggagaggattatattactctcagtattgcaggcagtgtacaccttttttgtgatattgttcctaatattcagaaagggaaaggatgatattactcccaatattgcaggtggtgtatatccccctctgatattgttccttatatcaaggaagagaaagaataatattactcccaatatcaaagacagtgtagacccctcctgtgatattgtatttaatatccatggggaaagaggatgatgttactcccaatatcgcagggggtttacacccacactgtgatattattcctaaaatccagtggaggagaaaataatattgctcccaatattgcagggtgtatacaggccctcccccgttatattgctcctaatatccagcggtggagaggatattactttcaatttgtgtagggagtgtatacccccctgtgatatttttctaatatcaaggatgggaaaggatgacattactcccaatatcgcaggaggtgtacacgccctgtgatattgttcctaatatctagggaaggagaggatgatattactttcaatattgcaggagctgtacaccctctgtggtattgttcttaatatttaggttgggagaaaatgatatgagtccaaatatcgcagaaggcatacacacttccaataacattgttcttaatatccgggggagagggtgatattactcccaaaatctctggggggtgtacacccccttctgatatttttcctaatatccagggaaggaaacgatgatattactataaatattccaaggagtgtacaccttcctaatatcctaatattgttcctaatatccaggggtgggagaggattatattactcccgatatcgcagtgggtgtacacccctcctgtgatattgtttctaatatccaagctaggagaaaatgatatcactctcaataccacagggggtgtacaccttccgcatcatattgttcctaatattcagagggaaagaagatgaagttactttcaatatcggaggggttgtacacaacccctgtgatattgctgctagtatccaggaagaaaggggattatgttactccccttatagcagggggtatacacctcccctgtaatattgttcctaatatcaaggctgggatatacgtggggggaaggatgatattactcccaatatcgcaggggttatacaaccttctgtgatattgctcctagtaaccagggcagaagaagatgatattactcctaatatcgcaggaggtgtacactcccccattatgttgttcccaatatgcagaaaaggagaggatgacattattgccagtatcgcagggtgtgtacaccacccctgtaatattgttccaaatatttagggggagagaggatgatattactcccaacatcgcagggggtgtacacacatcccctgtaatatagttcttaaaatctaggggaaaaggggatcttatttctctaaatattgcagagggtgtacactccccggtgatattgttcctaatagccgggagggagataattaaattactttcaatatctcagagagtgtacatcgcccttgcgatattgttcctaatatccagagcaaaagagaatgatattactcccaatatcttaggagtgtacatttaacctgtaatattgttcctaatatccagggggaagagaatagtattactgccaatatcgtaggggttgtacaccttttctgtgatattgttgcaaatatttagtagagggaaagaatattactcgcaatatcacagggaatgtatacttcccctgtgatattgttctgatatccagaaaaagagagggtaatattactcccaatattgcagggggtgtacaccccccttgtgatattgatcctaatataaaggaaggaagaggatattactcctcatatagaaggggttgtccaccccccttgtgatattattcctaatattcagggaagcagaggatgatattattttcaatatcacagagggtgtgcagtccacctgtgatattgttcttaatattcggggggagaggatgttattatgcctgatatcgcagtagaggtacacccctcaagtgatactgttcctaataaccaggggtgaagaggatgatattactcccaatatcgcaggtggtgtacacccccccatgatggtttctaatatacagagggggagaggaaaatattactcccaaaatcgctggaggtctacaccccccttgtgatattgttcctaatatccaggaaaggaaacgatgatattactgtgaatattccagggggtgtacacccgctttgtaatattgttcctcatatccagggtgtggagaggattatattactcccagtatcgcagggggtgcacgacgcccctgtgatattgtttttcatatccaggaggggagattattatcaatatggcaaggggtgaacaccccctgtgatattgtacttaatagttaggttggcagaaaatgatattagtctcgatatcgcagggggtgtgcactccgcctggtgatattgcttttaatatcaagggggagaaaatggcattactcccaatatcgcagggggtgtacaccgctcatgtgatattgttcctaatatccaggtggagagaacataatattactcccaatatcgcacaaggtgtacacccctcctgtgatatggttcctaatatccatgggaggagatgatgatattactcccaatatcacaggggatgtacaccacccttgtgatattgttcctaatatccagggaagaaaacgatgatattattgtgaatattacagggagtgtacacactccctgtgatattgtttttgatatacagggtgggagaggatgatattactcccaatatcacataaggtgtacaccccccgtgatattgttctaaatatttcggtggggagaaaatgatattagtctccatatcacagggggtgtgtgctcctcaggtgatattgtttttaatatcaagagggggaggagattatattactttcattatcacagggggtgtacacccctcctgtgatattgttccttatatccaggcgaggggaaaataatattactctcaatatcgcaggaggtgtacacaccccatgtgatattgttcctaatattaagggggaaagaagataatattactttcaatatcacagggtttgtactcctttcttgtgatatagtttttagtatccagggggaaagagcatgatattactcccattgtagcaaggggtgtacacacctcctgtgatattgttcctaatatccagaagtggtgaggatgatattactcccaatatcgcagggggtatacaccccacctatgatattatttctaatatccatgggaaaagagtatgatattacacccaatgtcgcagagggtgtgtatttttcctgtgatattgtttctaatattcaggcggggagaagatgatattactctcaatatagcagaaattgtacatccccgctgtgatattcttcataataatcagggaaaaagaggatgatattactaccaatattgcaggggggttacacttcccctatggtagtgttcctaatatccaggaagaaagaggatgatattaatcccattatccaggaagtgtacacccaccctgtcatgttgttcctaatatccagcagggaagaggatgatattacaccccccccccgtgatattctccttaatatccaggaggggagaggctgatattactggatatatagcaggggtgttcataccttctgtgatattgttcctaatatccagaaaaggagaggatgatattacttccaatatcgcagaaggtgtacacctccctgtgatattgatcctgacattcagaaggggagaggatgatattactcaaaataccgcagggcatgtgcattcccttgtgatattgttcctaatacccagaagggaacaggataatattactttcaatatcgcagggagtgcacacccccctttggtatggttcttaatatccagaaggaaagagggtgctattactttccatattgcaaggggtgtacaccccactgtggtatggttcataatatccaggcagggagagggtgctattactccccacagtgcggggcatgtacaccctgctgcggtacggttcctaatatccagggggagagaggatgctatgactccctatatcgcggggtgtgtacacccctgtgtggtatgttttgtattctccaggaacggagagggtgttgttacccctcatatcgctggaaatgtacactcccctgtggtatggttcgtaatatccaggggattgagggtactgttacccccatactccccatatcgtggggggagtgcacctccctgtggtatggttcgaaatatccagggtaagagagggtgctattattccccattttgcaggaggcgtacacccccctatggtatggttcgtaatatccggggtgaggggatgctatcaaaagaagagagaaagagaccccccatattgttctatattattttatactcagtacctgttttaagaagaaacaaggaagtgaaaccaaaagcaggcagcccggcgccaggcaccagacccaaaaccagacccgaaaccaggcctgggcctgcctgaccttagcctgatagttaaaattcaacccatgacctagcaaccaatgttatccatagattccagacattgtatggaaggacattgtgaaatttcttgttctgtgctgtttcactctgattaccggtgcctgcagcccctgtcacatacccactagattgctcaatcaatcatggccctttcatgtaagatctttagtgttgtgagcccttaaaaaggacagaaattgtgcactcaacaagctcggattttgagacgctagtctttcgatgcttccagctgattaaaagccacttccttcactacctcggtgtctgtggggttttgtccgcgactcctcctgctacactatgactccccatatcaaggggggtgtacacccccctgtggttcgtaatatccagcaggggaaaaggtgctattactccccatattgcagggagtgtacacccccttgtagtatggatcgtaaaatcaaggggggagggaaggtgtaattatccccatatctcagggggtgtacacccctttgtggtaaagtttgtaatatccagggatattacagggatattatccccaaattaatacttttataatttcttatgcctgcctttactgcaatctctgaacataaattgtgaagatttcatggacatttatcacttccccaatcaatacttttataatttcctatgcctgtctttactttaatctcttaatctcatcatctttgtgagctgaggatgtatgtcgcctcaggaccctgtgatgattgcattaactccacaaattgtttataaaacatgtgtatttgaacaatatgaaatctgggcaccctgaaaaagaacaggataagagcgatgttcagcgaacaagggagataagcataaggtctgactgcctgtggggctgggcagaacagagtcacatttttcttattgcagaaaatgagtaggagaaatatcactgggaagggaacgcattcctaggggaggcctatggacggccgctctgggggtgtatcccttatgtggttgaagataagggatgaaatacaccctggtcccctgcagtgccctcaggcttgctaggattagaaattccagcctggcgaattctagtcagaccagttctctgctcttgaaccccgtttcctgttaagatgtttatcaatgacaatgcgtgcacagcaggacatggaacctcaatagtaattccattttctccctggccttgtgaccttgctaggcccttctgcccttgtgatcttttattgccatttgaagcatgtgatctctgtgacccactccctattcgtatccccctccccttttgaagtccctaataaaaacttgctggttttgcagatcaggtggtcatcacagaacctgccgatatgtgatgtcaccccggaggctcagctgtaaaatttctctttcgtactctttcactttatttctcagaccaggtgacacttaaggaaaatagaaaagaacctactttgaaatattgggggctagttcccccaatagacattgttcctaatatccagaaaaaaagaagatgatattactcccaatatcacaggggttgtgaaccccacctgtgatatggttcctaatatccaggaagggagagaatgatattactctccatattgcagggggtgtgcacatccctgtgatattgttcctaatatccaggggaggagagggtgatattactcccaatattgcaagggttgtaaactccaccctgtaatattgctcctaatatttaggatttagggggggagaggataatattactcccaatatcgcaggggatgtatatgccctctttgatattgttcctaatatccagggggggagaggataatattactttccatatcacaaagagtgttcacccccctgtgatattgttcctaatatccaaaaaggaagaggatgatatcaatcccaatatcacaggaagtgtacaccccccccttttatattgtttctaatatccaggggaaatgagggtgatatttctctcaatatagcagaatgggtacactccccctgggatattattcctaatatccaggggaaaaaaagaggttgatattcttcccagtatagcagggaatgaatacaccctttgtgatattgcttctaatatcaaggggaaaagaggatgatatgactcccaatatcacaggggatgtaaacctgtggcgttgttgctaatatcaaggagggaagagtatgatattactcctaatgtcgccgaaggtgcacactttccctgtgatattgttcctaatatccaaaagggaagagaatgatattacccccagtattgcagggtgtacaccacccctgtgatattgctcctaatacccaggaaaaaagagaatgctattacccccaatatctaaggggacgtataccttccctgtgatattgtttctaatatccaagtggggagaggatggttttactctcaatattgcagggagtgtacactccccctgtgatactgtttctaatactcgggctgggagaaatagtattactcccaatatcgcagtgatattgtttccctgtgatattgtttctaatatctagtgggggagataattatattactaccccatacacaggggagggtgtacattcccctgtgatattgtttgtaatatccagggaaggagaggatgttactcccaatatcacaggggttgtacaccccttttttgatattgttcctaatatctggggggcagagaattatattactgtcaatatcacagagtgtgtacaccccctctgttatattactctttatattcagggcggtagaggatgatattactccctatatcacagggggtgttcacccctcctgtgatattgtttataatatctaaggggaaagaggatgatatcactctcaatatcaaaggaaatgtacacctttcctgtgatattgtttttattatataggggggcagaggatgatattaagaacaataccacaggggatgtacacccacgtattgatattgtccctaatatgtatggggaaagaggacagtgtaactcccgatatcgcagagtgtgtacacccccttgtgatattgtttctgatatacacggggagaaaagataatatttcttccaaaattgcagggggtgtacaaccccctgtgatattgtttttaatatccagtgggggagagaatattactcccaatattgcagggcgtgtacacaacccctgtgatattgttcctaatatccagagtaggggaggatgacattactttcaatatcgcaaggggtgtacattcccctgtgatattgctcctaatatccatgaggggagaggatgatattattcctaatatggcaggggctgtacaccttccctgtgatattgtttctaacatccagtgggggagaaaatgatattactccctatatcacagaaggtgtacactttccctgtgatattgttcctaatatccagaaggggagaggataatattactcccaatatcgcaggaagcttacaactcccctgtgatattgtttctaatatccagggaggtagggatgatattactcccaatatcgcaggggatgtacactcccccgtgacattgtttctaataaccagggggtgagaggatgatattacgcttaataccgaagggggtgtacacacccttgtgatattgtgcctaatagccagggggaagaaaattatattaattttaatatttatggggaaaaaggatgatattactcccaatatcacaggggctgtacaccgaccttttgatattgtttttaatatccagaagagaagaggataatattgctcccaatatcagaaaaggtgtaaaccccttctgtgatattggtcctaatatccagggagggagagaataatattactaccaatatcacagaaggtgcccacccccaaggtgatattgctcctaatatccaaagataatagggtgatgttactcccaatatcacaggaggtgttcacaccccttgtgatattgtttctaacgtacagggaagggagaggatgatattattcccaatatcacaggaggtgtatactcctctgtgatattgattttaatattcggggggaaaggatgatattactccctatatcgcagagggtgtacaccctctgtaatattgatcctaatatccagggcgggataggatgatattactcccaatatcgcagaaagtctacacaacccccagtaatattgtttttactatccagggggaagaggatgacattactcccaatttcacagagtgtgtacactcaccatttgatattgtttctaatatctagggggagagaatatattactcccaatatcacaggaattgtacaccacctctgtgacattcttgtgaatatccggggaaaaagagaataatattactcccaatattgcagagcgtgtacacccctccatgatatcgatactaatatttttttaaagaggatgatattactcccattgtcacaggatgtgtacaccccccttgtgaaattgttcataatattctggggggagagcataatattactccccatatcgaaaaaggtgtccaccctccttataatatggttcctaatatccaggatattacttaatccaggatacttgtaataccctaaatatacaattgcttgaacctccacctcccaggttcaagcaattcttctgcctcagcctcccgagtagctgggactacaggggcacaccaccacacccagctaatttttttttcttgtatttttagtagagatggggttttgccatattggccaggctggtctcaaactcctgaccttgtgatctgcccacctcagcctcccaaagtgctgggattataggcgtgacccaccgtgccaagccaggaagaggatgctctatagatttccccaataagagatggctttgcagggccattccaaaatatgtcaaagaaatacatttggggataaaatactttgatttcctttagggaatgttatctattatgtgatgctataccagagtcaggttggagtcggttatcttattgcaacaaagagtctgttccgtcactgttgggatctctattttttcctcttatttcttgagacagggtctcactctgtcacccagtctggagtgcagtggtgcgatcttcattcactgaaacctctgcctcctgtgttcaggtgattctcgtgcctcagccccttaagtaactaggattacaggtgtgcgccaccacacccagctaatttttgtattttcagtagagatggtattttgccctgttggccaggctggtcttgaactcctggcctcgtgtcatctgcccacctcgacctcccaaagtgctgggactgcaaatgtgagctattgtgcccagccaggatctctgttttaatgttagtgctggtcactttgcatgaactccaaagggaagaaatataatgaggtgtgtctgaccccctgccttctcatcgtgacctgaattagtttttcaggtttgcaggggatacccttggacaagaaggggctctattcggttggttggggggattagaattttactttttgtttacaatatttctcctgaaagagttaggggctcacaaggaatttccgcgtgagcaacttatgaggaaagccatctgggaagatatgtgtccttgtgtcactgggatattctcgtttaccccaatgatacggcaatgacgcagggttgtgaaattacagctatgtgtttggggaaaaaagaaagcaggattgtgtgactacgtttccaaacttcacttgcccttagccatagtgagttgggggcctggagattctgttttctttcacaatgatatagatacaattaaatgtatagaaagcaaaaaaataaaaaggtgagtaatgaggaacctctgattcctgagtggccatgtagttacccatggcacagagccacagttactgaaggtaaagtttgctggggaatttagaaatgaatccagctcttggaggagtcagtttactggatgcctaagaaaatgcaaacaaaataagaaaaaagggtaatattcaatcccatagttattgttacctgtcatagctaaagtaaaattaaaacagagtgctggcttcaatcttgatgctacactaagcttagatttcagtgaatgtgagtctcagccactagctcagagccacctcccaaagaccaaatcatgtagggacaatagaaagtacttctgagaattgtggttaccaagaacctagtaactgttggggaggagcaaaacaaagtacagaaaccagagggtacaatctgagtgagactgctatcagcttctggaggagcctttactaaaatgaatgatgagagtaactggatgatgagagtaactaatggatgatgagagtaagcaatgtctttggttttcttttttttttttttttttttttagcagacgtctcactcttgtcgcccaggctggagtgtaatggcatgatctcgcctcactgcaacctccacctcctgggttcaagcaattctcctgtctcagcctcccgagtagctgggactacaggcactcatcaccacacctggctaatttttgtatttttagtattttctggtgagggtccaggtttccggaaacaactcagagacatatgttaagatgttatctttagttttcacagggaaccaaatatgttacgactccaatttccttggctattgttttaagttaccattaccttctcgttgatcaagttgctcatttacttctcaagcctagctagatgcctggaatttcccttgaaggaagtcaagattttcctttatctccatactggctgatggtgatcgagtaagcccctaagaggggtccctgctccatctcgagatgctgctagattctacagtgcctaataaacagctctcgcctggccgacaaagagctgcttgctctctggatagcaattccaaagtgaacagacaacatcctgtttggaagactgccactctgttagaagaagcatcaggaaaacctttcttttgagctatttataactaacagcaattgaccaagtatacttttgtgagtgaaactgacctttctccctgtaagaattctccaaaatttggaaactatttgtgagtatttttacttatggcaatataattattggcacaagctcaatcagattcggttttctttcgtaacaggaaccattggagatactcattactctttgaaggcttacagtggaatgaattcaaatacgacttatttgaggaattgaagttgactttatggagctgataagaatcttcttggagaaaaaaagactgggtatattttcaatatgctttccttttaaggtccctcacctgtggaaagtaaagaatgtcactttctgacaggctcaggaacctcaagttatgtagggatctcaagaagatgggggaattcacccagttcatacaggtgaaattgctgttgcaaagattatgaatatgagagaagtccagcatggctgacttcatctcgtgtctggcctcaggctggctgcccttgctcactcttgggcataggccaagctagccatgggaggaatttagtttatagtttaactttgaagcacggatgataatagtctctccctaaaatgaaccccttccttgctcagggactgaaactacctttgtatgacaaatgaaagcccacaagattaagattatgagaggggcctgaattctgctaaaatgcaggtgtagctgactgataacaagtcattgtcccacagcttgcctttctataatctcttgcttctcaggagtcacatggccagaggtcctgagatttccagtcctgtgacccccacccagagatggacttagtgcatgaggaccattttccacacccctatgatttcatcctcaaacaatcagcagcaaccattccctagccccctgccttccaaattatccataaaaatcctagcctctgagttattagggagattgattaataatcccagtcctaccccttgggttgctctgatttaattaaaccttctctactgcaataccacggactcagtaaattggttttgtctgtgcaatgggcaagaagaacatgttgcatggttatacaggtactacaagcacagtctgatggcaaattattggttttgcttcctgcccttgatgtttctaaacatctagtccaaaattacttgtgaaaggtccagcaaagccaattttaaaagaggctatatggccaatcactattctttctacacattattgcaaataatcaggccacggctgggcacggtggctcatgcctgcaatcccagcactttgggaggctgaggcaggatcacctgaaatcaggagttcaagaccagcctaggcaacatgataaaaccctgtctctactaaaaatacaaaattagccaggcatggtggcatgcacctgtaatcccagctacttgggagactgagggaggagaatcacttgaacctgggaggcagagattgcagtgagctgagatcacaccactgcactccagcctgggcaatagagtgagactttgtctcaaataataataataataatcagaccaagtataatgaaattaaaatttattttgcaaataaattggtcctactacaatttatccttcatagaaatgtggaaactgaagataaaaaaaattaggtttcagaagaaaactatactacacctgttattagattctagccctaaacattgtttttgaggtttttattatttacctgcaatttggtctaaattctgaattatttcctgactacaagtatccaaggaataaatgggttttctttttctttatgatagttttagttggcttctaatgcaacaacaatttttattgtaatcctgtgtgcattctattcctactattcaaattattaatgttatagatctttcattgtagtacttctgaattaaccaaaatcacagtattctgaagatgattctacaaagcctgctgtttctacaaaggctgctgatgatttctacaaagcctgctgtagtgttgctgtggcctctgcttaaaaaagtagaaaacacattgatgcagcatgttcaccccaacctccctgcctaaaggctcagggaccatcttggaagaggaaggcgcgtgagattgtaagagccgaattagggggatggagtgtggagaataaggacacttcatcttggatgctcacctgccaaattgacttctgatgaaagccagctccagaaatgtgcctacagttactactttcacctaaaccctgcccttagtcaaatccttctcttcttctaagcaatcaacttcaattccttgtataacccacagtataaaagggcttttataccattctatcctattgcatgtaagccttgggtctgggaggtaacagtgtgggattccaccatctcatctccctgccacccaaacatgcctgctcttctttaagcaatattaaatgtttgtacttcagaaatttgatttgtcagcctcttcttcagactctcagcttctttggcctttgggagtaaatttgcataggcctgctcaaaacaggatgttctgggggtttgggggtgttgttttgttttgttttttgttttgtttagagacagggtctcactctgtcacccaggttggagtgcagtggtgcaatcatggcacactgcagcctcaaactcctaggctcaagcaatccccccaccttggcctcccaaagttctgggattacaagcataagccaccatgcccagccctggacttttctttaaagacatttacacagtgtaggaattactgtgggtgcactgctcaggtccccttctccaggatgctcattcctacctcatagatgattttcctgcagagatttgacctcagctgaagggcagtcacctggtccaggtggttgctattcacctccttcctgagaacagccaacagccagggacacgctagcacagagatataagagcgaccaaggtgaggccccttctgtgctgcggtgcatgctccagagcctccctgggatcagacttaagagggtctccagccagatctggtcttcgctgctttcctcgagctccccagcgcactcctgcaatgcatcttttttttttttttttttttttttgagacggagtttcactcttgttgcccaggctggaatgcaatggcgcaatctcagctcaccacaacctctgcctcgcgggttcaagtgattctccttcctcagcctcccaagtacctgggattacaggcatgcaccaccacgcccagctaattttgtatttttagtagaaacgggtttctccatgttggtcaggctggtttcgaactcctgacctcagttgatcctcctgcctcagccttccaaagtgctgggattacaggtgtgagccactgtgcctggcccaatgcacctcttgaatcacctcctcatgctttgcttttagagaacatgatccccaacatgtgattccagcaaagattctagaaagccaaccgtgacaatcacttctgggtttagatgacccccccccaccacaagatggcagtgagcacctcatcacagaggtgctgatggtctgcagcaccgcgccaggccagaacgtgccttttacagaagaaaataacccagtagctgactaggatggtgaggagggctggtgagcactgcggtagtgagagggacactagcatcactgagatgcaagtgatggtcatttttcataggtcaaagctcaaagcaggggacagttacagggcagggcttcatagcaccagtgtgatgaaagtatctgggagtggctaaggccagcactatgccatgggaagcaaggtgggcctgaggaggaggcagcagcgtcagcctgcaacaagtgggggctgccctgcagagacctaagagtcatgttatagagcacagtgtctgtaaggccaagaagtgtggacagccaagtgtgtcaattactagacatactcaagaggagcaggaagggcagggcatggtggctcatgcctgtaatcccagctacttgggagactgaggaaggagaatcgcttgaacccgggaggtgaaaattgcaatgagccgagatttcgccactgcactccagcctgtgtgatgggagcgggactccatctcaaaacaaaaaaagaaaaaggaaaaagaaaaaaagaaaaacctaggtatacttctcaagcaaataaaaataatcaaaaccaatatcatgcccgggcacaaatttcatatatataacagatttaaatatatgagggtgattatcctctcatatctccatttttttttgtttttccatttttttctttactaaaaaaagttaatgccaatgacacacaatttttttttttttttttttttttgagatggagtctcacttcttcgccctggctggagtgcaatggcgtgatctcgactcactgcaaagtctgcctcctgggttcaagcaattctcctgcctcagcctcccaagtagctgggaccacaggagtgagccaccacacccagctaatttttgtatttttaatagagacggggtttcaccatattggccaggctggtctcaaactcctgatctcaaataatctgcccgcctcggcctcccaagattctgggattataggcgttgagccactgcgccccgcctatgtatgattttttttttaattttattttcataagtttttggggaacaggtggtattttgttacatgagtaatttctttagttgtgatttgtgagattttggttcacccatcaactgagaagtatacactgaacccaatttgtggtcttttatccctcacccccttcccaccctttcccccggagtccctgaagtccattgtatcattcttatgcctttgcatcttcatagcttagctcttgaacccttactttctgtttgagggagaagacatatcatctacaagtagatactgtgtaaacattccattgcatgactatcccataacttatttattatttgtgtttggttatttgctgctatgtaacaaccccactcccaactaaatggtgtgacaattccatgattctgtggatcaaaaattctgaaaagtcaaacccaaggagttttgtctctgctccatgatgctaaagcctccgcaggggtgaggcgaatggctcagggtgactgaaaagctcagggttggaacagctggggatgaggcctctatgtataagatgattcttcactcacaggtctgaaactatggtggggacagccagaaggctcggctcagctgggacagtcacctgagccctacacatgacctctccaacatggtgatcctgaagcagttgggtttcttacacagcatcacacttttcttttttttttttttttttgagatgaaatattgctctatcacccaggctggagtgcagtggcacgatctcagctcactgcagcctccgcctaccaggttcaagcgattctcctgctccagcctcccaagttgctgggattgcaggcgcctgccaccaagcccagctaatttttgtatttttagtagagacggggtttcaccttgttggccaggctagtcttgacctcttgacctcaggcgatccgcctgcctcggcctcccaaagtgctgggattacaggcatgagccaccgcgcccggccaaagctcacacttcttatgattcagccttagatgtcacatcagttcattttccccacacttattagtgttagaagtcacaagcccacccatactcaggggactggcacacagaccccactctcaatggaaggggtgggacaccaccattcctgctgatgggcatttgggtaacttcctgtttgaagctattaagattgggctgctgtggccgggcgcagtggctcacgcctctaatcccagcactttgggaggccgaggcgggcggatcacgaagtcaggagatcgagaccatcctggctaacacggtgaaaccccgtctttactaaaaataccaaaaaaaaaaaaaattagctgggcatggtagcgggcgcctgtagtcccagctactcgggaggctgaggcaggagaacggcgtgaacccgggaggcggagcttgcagtgagccgagattgtgccactgcactccagcctaggcgacagagcaagactccgtctccaaaaaaaaaaaaaaagattgggctgctgtgactattctagtaggtgtctttggtgagcgcctacacgtgtttctctttttctctttagtatatgcccaggaggggaactgctggctcccagataccgtatgttcagggtcacacacacttccacagggttttccaaagcccttgtaccagcacgcactcccagcacctgtgtgactgctccagctgtcccacagtctcatcagttctattgctgatattttcattttagcttaagttatatttaataggaaaattaccgttgcctctgccccccgttcctgcctgtaggagtttctcgtagctgttgctacaggtggccacaaatctgtcacttaaacccacacaaattgatgtccttatggctttggagtcagaagtgtcaactgaaggtactagcagggctgtactgacctggtggcctcagggagcatctgtgctgcttctccaccttctagaggctgctgcatccctcgctccagccccttcctgacaccactcaccctcctacttctgttatcacatcctcaccttctctgtgttcagggctccctctgtctctctcttgcaagcacacttgggattccattgagggccacccacataacccaggagaatttctccacctcaatatccttaacaactgcagagcccttttgccataaaagttaccattcacgggttccagggattgtgacatgggtagctttaggagtgattattcctgcctgtctcccgctcaccagaacttggactttctctctcaacaggagccccctgtgtgggaatagcctgtctcaacgacgccctctataaggacctgcttcctcaaaggacctcatagtcgggtcctgcccctcagtgtccagtctgccttggctggaggggctgcaggggtgtgttggcgccacctggtggagacagggcatcacagcaggtgggagcccagtagaagcacaaccaaaacatgggtaatgtttaaaattttctggctaagcgctgtggctcacgcctgtaattccagcactttgggaggccgaggtgggtggatcacatgaggacgggagtttgagaccagcctggccaacatggtgaaacatcccctctactaaaaaatacagaaaaattagctggacatgtggcgcgctcctgtaatcccagctactcgagaggctgagacacgagaatcgcttcaaccccggaggggttgccgagatcgcgccactgcactccaggctgggcgatagagcgagactctgtctcaaaaaaaaaaaaagaagaggggaggcgaggggaggggaggggaaaagggggaatttgtttggagctgagacatccatcttctcctgacctcagatatttgcactcctggttatgaagccttcacacttggactgaatacaccaccagctttcccgatttccagcgtgcaaatggcagatcgtgagacttctcagcttccataattacatgagccaatttatatatataaattgggtcctccagaaaaacagaataaattatatatataattatacgcataacttaattaaattatacgtataacttagctatatatataatttattctgtttttctgaagaaccctactgacacaaatgttgagcatcttttcatgtgcttattggcttaataacttgtacatcttctttggggaaatgtctattcaagttctttgcccattttgtaactgaactattaatatttgtctttacattgttgagttgtaaaagttccttatatattctagatactagagccttatcagatatatttctgcaactattttctcctaatatataggttgtgtttttattttctttttctttttttttttattgagacagtctcactctgtcacccaggctggagtgcagtggcatgatcttggctcactgcagactcgacctgccaggctcaagcaattctcccacttcagcctcctgagtagctgaggttataggcacttgccatcgcacccagctaatttttgtattttttagtagagccgaggtttcgccatgttgcctaggttggtcttgaactccctgcctcaaagcgatctgtcagcctcagtctccctaagtgctggaagtacaggtgtgagccacagtgcccggccatctattttcaatagtgttttttgatgtacacaggtttggaattttgataatgttcaattcatccatttttttttttttttttttggttctttctactggaccaccactcttgagccctctaatccaacctccacgcggcagccagagggagctctctaaatgtaattactctttccctgctccacctgctcaaaacagtgtcacatttgtgatttaaaacagtatttctcaaacctaatttgcaaacaaagcaggtggaactcttcttgtatgcacagcatctgatttggttggtctggcatgggtctgggagtgagcacacctaccaagcggctgctggggtaacttgcgttttccactgatgatttcagcaatgtttccggtcccacatgctcctccagaaccttgtactcccccatgaaaaggtggagtccatttccccttcctttatttatttttttgagacgaagtttcactcttgttgcccaggctggagcgcaatggcgtgatctcagctcaccgcaacctccgcctcctgggttcaagcaatgcttctacctcagcctcccgagtagctgggattacaggtatgtgccaccacgcccagctaattttgtatttttagtagagacggggtttctccatgtcggccaggctggtctcaaactcccgacctcaggtgatccgcccgcctcagcctcccaaagtgctgggattacaggcgggagccaccgcgcccggctatttccccttcctttgaacctgatcaggacttgacgatggcatcaacatggtgagagtgaccctgcatggcttatgaggctgggttacacaaggcgatgttgcttctgactggctccctctcaggatacatgcccttggaacccatcctctaagctccttgggagcccaacttagcccatgtggagacaagacagggagagaaacagaggcacccccagccctcagccagcatcaaccgccagacaggagagcaaatgcgccaacaatgattccagctgaagcctcagacagcgtggagcagagatgagggatccctgcagattgcagatgcgtgagcaaaatgcatgctgtcactgttttgaaacaacaatgtctgggggctgtttgttatgcagcaatagacagctgtaacaatgctgttactgctgtattccatgaatgactgcactttgagtagcagggggctagatcactagataagccccatggcttctgtgtatgctatttttctacttttatatccttttcattcactttttttttttttttttttgagacagagtctcactctgttgcccaggtgggagtgcagtggtgcaatcttggcggactgcaacctccacttcccgggttcaagcaattattgtgcctcagcctcctgagtagctgcgactatagatgcacccccatgcctggctagtttccgtatttttagtagagacggggttttgccatgttggccaggctgatctcagactcctgacctcaggtgatccacccaccttggcctcccaaagtgctgggattacaggcgtgaaccactgcacccagcctcattcactttctttacttggctcatttttccttgttgcctcaattctcctctaagatcactttcctgacatttcagcctgggcctgttgccttctctgggtcccctccgcctcctgtgcctcccccatctcagccttgatccctcagattatacttcctctgtccccaccctgaccatcttggctgtccctggatagggatgggtatcttctcccactggtctgggagatctggaaggacaggcctggaaaagacttggtcactgctggaaggagctcagttagtgtggtgctgaggacagtacgggtgaggctggccccttcacccaaactcccactctcttccatagatttcacctctgtggcccaggccataggattagggcaactccccttaaacatcgagtccatcctccaagctgtccttttttttttttttttttttttttttgagacagagtctcgctctgttgcccaggctggagtgcagtggcgcgatctcggctcactgcaagctccacctccagggttcactccattctcctgcctcagcctcccgagtagctgggactacaggagcctgccaccacacccggctaattttttgtatttttagttgagacggggtttcaccgtgttagtcaggatggtctcgatctcctgacctcgtgatccgcccgcctcggcctcccaaagtgctgggattacaggcgtgagccatcgcgcccggcctcatgctgttcttgaatagtgagcacctgttacaagtcgccccaccagcctctcacttgtacccccctcatctctttctccccaagagacagaggaccctggcacttgtgaagcatgacccagaccctggggccatggcatccaacatcctcattccccatgacccctactgtctagatgtagctgccaagagacccccagactccccgggcctctgtctagagtgccaagacagagagagaatgccctgccgcttgcatgctttgtggggtgtccttcccccttccctggctgctaggcgtgacttcaacgttctccccaacccccaaacagcagcactgacaccagctgcagacctggctcaggttagctaatgaggaccaggctggggatggagcctgaacccctaaaccccagtcctgtaccccaccctaatcctggggtctccactggacaaaacgaagcagcttggtttttcgttgttattgtttttgagatagagtatctctctgtctcccaggttggagtgcagtggcgtgatctcagctcactgcagcctccgcctcccgggttcaagtgattcttgtgccgcagcctccccagtagctgggattacaggcgcgtgccaccacacccagctaatttttgtatttttagtagagacagggtttcaccatgttggccaggctggtctgaaactcctgacctcaagtgatttcccagcctcggcctcccaaagtggaagcggcttatttttaaggagaaaactcccgtggaaaggaatcagcacctcctctgtcaacatttcacttctctgaaaagactctcacttccaacagaaagtgctttgtaacacaacaatgaggctgggcgaggtggctcatgcctgtaatcccagcactttgggaagctgaggcgagtggatcacgaggtcagaagttcgagaccagcctgaccaatatggtgaaaccccgtctctactaaaaatacaaaaattagttccgtgtggtggcgtgagcctgtaatcccagctactcaggaggctgaggcaggagaatggcttgaacccaggagatggaggttgcaatgagccgagatcacgccactgcactccagcctgggcaacagagtgagactccgtctcaaaaaaaaaaaaaaaagaatgagaacatatggacacagggaggggaacaatacacacaaacaaaatttagaaacaggtgaaaataattttagtaatatttttactaatactgatatgctcaaaatattattatttcaataagtaatctaaaaattattgagatgtcttatgttcttttcatcatactaagcctttaatatttggtgtgtattttacactcacagcacatctcaatttgcagtccccatgtttcaagcactaaataaccatgtgtgtccggtggctaccatactggacagcgttgatctgaaatcgcatctgtatgcatcaccagcatatttgcagagatccccatctcagcagcacacctgaggctcatctgcgaaagcacctgcaacttctctacaacctcccacatcacctccaaacacatcctcatgtcatctgcaaacacacccatagctcacaggccaatgcctaaatatcattgcaggcaccttcagagaaagcacttactaaaggggtatacttgattccacatctgctttgacctgcaaatctcccttctcctttacatacatttgcatctcatttgtatgtcaatctaaatccactggcagagcctcagatcatcatctcaaagtcaggtggatgtggggctgggcaggcctccaggtgttcctcctcctgcttcctctggggctcttgatcctcctcctcttccttgctgctctcctcctcctcctccaatatggtgaccagttcctcccgcagcgcccccatctccagccccaggctgcacagctgtcccagcagctggacatccactcggcgcaggttcccctgccagtaggaaggggacgtcacagggatgccaccccagagagcaaggggtctctccaggacctgggtgagagcaggtcccaactcatgtcctggccacagcgcctgggcagggtcctcactgtgcccatggaccctaactgccttcctgcttctcagagtgtctcttgatctctaactcttctctttgtctctccatttcattgtccctgacttctctctctctgtctcctccctctcttatctatatctgtccctgtttccctttgtctctgtccccatttattttttgtctttccatgcccctgtctctctgtctttatgtgttgccatttctctgcccctgcctttggctctctttctctcgcttgccctctctctgccctccccaactttctcaaattcagtctgtctctccatctctgttcctgctctccgtctctgcttcccacctctgtccctctcttttgggatctccctgtccccacctctgttcccgtccctcactctatgtctgtctctcggtgtctgtacatgcctctcatgtctctgcttctatctctcagattctgtttttcgatctctggccttctctatttttgttcatttccattcattctcatttcctctctttctctttcccttccaaacccctcactcaccagctcctccctgatccacagcagactatcgcaggcacctccagtgtctgcccctgcagtcctgagggtctgaccagggatttccactggggagacctccctcagggcctgggggggtgggcccagccccggaggcaccagtccagcctgattcagctgcctccacagttccatcgtctctgagctatggctgcaaggagcaggaagtagcaaggtccagggtggcctggtcccctggggagctgtgtgcgtggtggagagtaaagggcagagggagtgggatgggggttcctgggaaaggtatcccaaagtccactcttcagagagaatcagctggccttgtgcttttctttttccttctgaagtctaacctcaactctgctcacagggttcaaacatagcctcttgcagaggtctaactccacccttccctgcctgtctcaggcctgacccctcaggggcgctcagtgtctgtagatgcctggcaccctctgtccttccacctgccccccaccaccacttctccagcctctcctcagcctccatttgacctctggcttgcccatagcttggtccttgcttgtcctcttggcacgggtcatcctagggctttcccaccagtgtgcctttgggggcaggaatggctcccaggggcaccaagacagcaatcccttagctggagtgcctgtgtccaggctgctggcctagggccaagcagccaattctgctgaccctggacttgcctatgggtatattatccctgttgagggtgagggcttctgctgtggaaaagtctgggaagcactgcaggcctctctcggccttggacccttccttcagacccaaggtgcatatatatacatatatataatggtagatcacgaggtcaggagatcaagaccatcctggccacatggtgaaaccccgtctctagtaaaacacaaaaaattagccgggcatgctgccgcgtgcctgtagtcccagctactcgggaggctgaggcaggagaatggtgtgaacccaggaggtggaggttgcagtaagccaagatcacgccactgcattccagcctggcgacagagcaagactccatcttaaaataaacaaatgaacaatatatatatatatgtattttgttttttgagacagagtctcgctctgtcatccaggctggactgcagtggtgcaatcttggctcactgcaacctccgcctcccgggttcaagcgattcccctgcctcagcctcctgaacagctggggttacaggtgcacgccaccacacctggcgaatttttgtatgtttagtggagacggggtttcaccatgttagccaggctggtctcaaacccctgacctcaggtgatctgcccacctcggcctcccaaagtgctgggattacaggcgtgagccaacgcgcccagccccaagtcccttttaccatagaaagtaacatagtcacagtgcccagggattcacaggtatggggagagggttcgttattcagctgccacacccaccttcctaaacctgctgcccttccagtttcctcacgtgcacagccacgcccgtctgcttttagtttctcaatctgttggcttaaccttcaaaacaggcccaggatttgagcacttctcaccattccctctgccccatccccattcatctcttgcctagactgctacagcagcctcttttactggtcccctgcatccacccttgccctctaaggcaagggtccccagtccctgggccaaggaccagtaccagcccctcgcctgctaggaactgggccgcacagcaagagatgagcagcgggtaagtgagcattaccgcctgagctccgcctcctgtcacatcagcagtggcattagattctcataggaggcaaaccctattgtgaactgtgcgtgcgggggatctaggttgcctgctccttatgagaatctaatgcctgatgatctcaggtggaacagtttcatcccaaaaccatccccaccccacccccgacccccagtctatggaaaaattgtcctccacgaaaccagtccctggtaacaaaacggttagggaccgctgctctaaggtacattctccacctggcagaaataatctttacaaaatgtaaatccgattttgacactcccttcttcccactgtgaatagaataaaaccctaccaggcctgcaccgtcagcccctgcccacctctcaacccagtctcctatctctgtctgcaagctggttcccacctcaaggcctctctgctctagaggctacctctccctgcagcgcttttcccctagatctttgaatggctctttccttatcattcacttctacttcaatgtcacctcttcagagaggcctttgctgatggccctacacccagtcacttttttttatctgcttctcatcaaaattgccttgctgattcctttgtttcttattcatcctctcccacatccatcctctcccagcccagaatgttgacttcctgagagagggactgggtctgtcctgctcaccatggtaacctcggcatctagaacagtgcctgccatcacgtggtaggtgctcagtaaatattcttggaactaatgaatgaataattctatccacaagacttcacaatggctcttcatgctgcgatctagctttcaactccaaactggtcttgagatctcacctcagtctctaaccttgacatctaacctcttcacccactctcttacctgaccctaatttttaaaaatgacgtggtcagcttttcagccccctcattccctgtttttaggaggtagtgagtggaagctggaagaataagaaagcttggggagactgcaattgcagtcaggaaagaaaggtactctgccgggaagaacaccccatcttctcctagggaaagattgtggagtcctggggtttgttttgtttttcaattttttgttttaagagacagcgtctcgctctgtcacccaggctggagtgcagtggcgcaatcacagctcactgcaacttcgacctccccggctcaagtgatccccccgcctcagcctcgtgagtagctgggaccacaggcgtgcaccaccacgcccggctaacattttattttttgtggatataaggttgccctatttctttgtggagataaaggctcccctatgttgcccaggctggtctcgaactcctggcttcaagcgatgctttcgcctcggcctccacaaagtgctgggttcacaggtgcgtgagcccgacctgtgtctcgttttgaagctcagggagagggcgctgtgagcaatccctaaaccctttaagagtaaaaagtgcgtgcacctttaagaggacggttagaaaacgcggggcgtggccacaggagaataagttcgcgctgaaccaggagcgtgggataagaccggccccttccggttacgaaaccttagcaagatggcggctccctgggcgtccctgcgcctggtcgcccccatgtggaatgggcgtatcaggggcatccatcgcctgggtgcggcagtggccccagagggcaatcagaagaagaaaaggacaatactccagttcctgaccaactatttctacgatgtggaggctctgagggattacttgctccaaagggagatgtacaaggtgcatgagaaaaatcgatcttacacctggctggagaagcaacatggtccatacggcgcaggtgcctttttcatcctgaagcagggaggcgcagtcaagtttcgagacaaggagtggatcaggccagataagtatggccatttctctcaggagttctggaatttctgtgaagtgcctgtcgaagctgtggatgccggtgactgtgacatcaactacgagggcctggataacctcctccgcctgaaggagctccagtccttgtcgctgcagcgctgctgccacgtggacgactggtgtctcagccgcctctacccactggccgactcgttgcaggagctctcgctggccggttgcccccgcatctccgaacggggcctcgcctgcctccaccacctccagaacctccgcaggctggacatctcggacctccctgccgtgtccaaccctggcctcactcagatattggtggaggagatgctgcccaattgcgaggttgtgggagtcgactgggctgagggcctgaagtcagggccggaggagcagcctcgggacacagccagccctgtccctgcctagcctttagccctgtccccactcacgtggcttctcagcgggctgcatggaatgtctggtagctcaccacacttctggcttccatttgtcttcactcaacgtcagggtgggggagtggtgctggccaatcacaggagagagcgtgagttcccagtatttattcctggctgcccttggctaaaggtcacagctcctgtcaccctgtcaggcagccctttccatgcccctgttcaggcctggggaggtaaaggctcaggctgttagtagccgcagagagccacactcaccttgtcaggagactcttctcaaactgtccttatgtgagtgcactgccatttcttgcagggaccctgactgacacaggggctactactgacactttacagggatggttctcccccgtgcagggccgctgtgcccactgcaggacatgcagcatccttcgccccactccactcactaaaggccagcgcaccccaggccccatagtattgctggttatggatttattgactttatgttccaaattcagctttttcagttggctgttttttgaaaggggataagctttgtcagtagagggcaccgaacaggcattataggaggaaaggcgcctccttcgtggttcttgttggcctccactgaggcacctctctgggaataacgttccccagcaccccaaatggatttccagtcaattcagaagcattttaccagtgaagccctcattattccagttcactgttaaagccagtaattctctatattaaactttccctgttcggtttatactccggagtataaaccgaacaggattatattatctgaagctccccttttgggcggaatgtg

SEQ ID NO: 735300 - DNA, 188300 bp, Homo sapiens
ctccaaggctgagggatgaggagacctgctgaggacccagggccttatctttccatcccactccataggtcccagtattgactgatgctgtcttcacctcctagcctcacttttaaccttctggcacccgcccaccactgtccagttcactattgaagccctgccgtccagtgctgcagagggaaaggatgttcttctactggcctgcaatatttcagaaactattcaagcctattattggcacaaggggaaaacggcagaagggagccctctcattgctggttatataacagacattcaagcaaatatcccaggggccgcatacagtggtcgagagacagtataccccaatggatccctgctgttccaaaacatcaccctggaggacgcaggatcctacaccctacgaaccataaatgccagttacgactctgaccaagcaactggccagctccacgtacaccgtgagtgattcccccatacctctgggtgctggcggtcagttctgcttcacacacatgagattgtcaggcctgggctgtgcctgcatccccctctgcattttgtcccgtgttgagatttgggcatttagtgcaggacacacacatggtaggtaaacttcaacagatcagaattcctttcctgcatccaggccctgcagacactgatggcgggggcgggggggcctcagcagggggaggtcagtctcagccaagcaccccatgccctccccatgaacctgaccctgagaaagaccctggagaactgggtcagggcctggcctgagggcgtcctgggaacctcacaaaagcccagcctcaggactcctgactccgtgtgaccccgggaagcctgtgtcagggctggggtgtggtctcctgggcagggcttactgggagcaaggatttaccagatgtctgcgggctgtggttcctgaagcttctcatcagtgagggctcagctcccagagtctcatctagacaaggacagagcctaccactttccctgggactcagcctggagagggcagggggacaggattactagggcattggccccctgaatgaggagcttaagagatgcccttgggcagtcagtggcccaggggtaggaacagaggggagaaaatgttcctggcagcttcttgtccaccggggatcatgcccaggggtgctctcccatggaggcaaataacagatgctgttgatgtgaacacctcctctgtgccaagcttcatgtcagatcctgtgaataatttaaagttcattcacagacaaagtggcaagcctcagaccattttccatttacatattgtatggaggggaaactgaggcacagagagatacagacaccggccacggtgggcagatcgcagctggcagagtcacatgagggctgtctgcagctgctgccacgtcctctccttcatccctggtgccttactaggtgtctgtggaccttagaacagccactggttcggatgttttcttcttaggtgtctacagctcggagggggagattctggtctggagagttatgagtaaatacagaattaatcagttttttcttaactaaatcacctgcctcaacaatcagtcagtgctggggaagttcaggcctcctcgctcaggtccacaccccgcatctctggacatgaaatggcttcgtgtgttttctgatgtgtgggtatcattccaacaggaggataaaggggaggactttgctttctctccccattcacaccctgcaccagccagggcccagtgtgagacacatactccgtagttctctcatgaaggagggagggaatgaatgaaggaatgatctataacctcttcagagacagagacctggatacaagatcctaggaggttctgggcccaacgtgagacacacactctgtagttctcttatgaaggagggagggattgaatgtaggaatgatctataacctcttcagagacagagatgtggatacaagatcctaggaggttctggccacacctgttttctgtccctctagagcctaagacccatgtctcattcatctggcccgtttctcctaaatctgcccctgggagctgagtctcatctgaccctggggctgcagggctgtgggaaggttttcaggggagggatcaggcttgcgggtagtcccacacgtttgccttacaccctggagctctacctggttctcactatgaatatcccataataatcccccctatcctttctggggagtagaaaaaaagtaaatatttaaaaatatgccagagcatctgttcttcttagcaagttcagatagttattagttagcaggaataaatcgttattttaccagagcctcacctgctgggggtttatgggagcctaactgactgaggggggtgggaaatatccaactccagccccctctagccatcatgtcccacctaaaggagagaaaaaactgagaggcacttgtgacattcacagcccagggcacagactctatccaggaccacagaacccctccctccccccactcaccaccgcatcactgaacgcctgctcacccaagttcctgttgcccagtacatcatgtcctggctttcaacaaaaactacaagacagactagaggcaaaaaaaaaaaaaaaaaaaatgcagttcgaaagacagaacaagcatcagaaccagatgcagatgtggcagggatgtggcagggatgttgaaattatcagaccaggaatttaaaacaactctggggccaggagcggtggctcatgcctgtaatcccagcatttgggaggccgaggcaggcagatcacctgaggtcaggagttcgataccagcctggccaacatggcaaaaccccgtctctactaaaaatacaaaaaattaggcaggcatggtggtgggtgcctgtaatcctagatactcggaaggctgaggcaggagaattgcttgaacctgtgaagcggaggttgcggtgagcctagattgtgccactgcactccagcctgggcaacagagcgagattccatctctaaaacaaacaaacaaaaaacaatactggctaatatgctaaaggctgcaatggaaagcatagacaatgtgcagaacagacggatgctgtgagcagagagatggacaggctaagaaagaataacaacagctactatatctatctatctatctatctatctatctatctatctatctatctatctatatatatgtatatatatgctagagatcaaactcactgtaacacctggatctcagagtggttgtgaggatgtttattaggagattaaagagattaaagcagagttatacacagggcgagagctcaactgatgctatcaactagtattcttatttttttgatgttgttattggcaataaaatcaggaacaatgcagtaaaaatttggttttatcatgtacgagttctgtgaccttccttgacttactgaggtactgtaagtctcagattctaactctgcagatggcggtgatgcccctctccctcaaggtgatgtgaggatgagatgagctgtaggtaggttggtgcccactgtgcctggcacatggaaggcccctgaaaatagtcaatgaacatcatccccgctcatcagcatggagttgacagtgagggctcgctctctgtgacaatcatggaatggaaaagaagaaacaagaggaagactgggcgcagtggctcatgcctgtaatcccagcactttgggaggccgaggcgggcagatcatctgaggtcaggagttcaagaccagcctggacaacatggcgaaatttcatctctactaaaaatataaaaattagcctggcatggtggcacaaacctgtaatcccagctacttgggaggctgaggcaagagaatcgcttgaacttgggagatggaggttgcagtgagccgagattgcgtcagtgcactccagtctgggtgacagagcaagactccatccaaaaaaaaaagaaaaagaaaaaagcaacagagggaagaggtgtgacatgagaggaagaagggatttaaaggtacaggagcagggcgaggtgcaagcacctgtgggagaatgtaggagttggtacatcccagtgtgtcaagtctgagacacagaaaatggtgcaaccgtggagagcaagggagtcagctatgaggacagcccaacagaccacactcaggctctggagcatttccttcctccctgactatgcccctgccctgcaatgccccttatggtttcccttggaacaaacttgggccttgtcccctttgccttcccctttctgcagaaaacaacgtcccaggccttcctgtgggggccgtcgctggcatcgtgactggggtcctggttggggtggctctggtggccgccctggtgtgttttctgcttctctccaggactggaaggtaccgcagcttttccccagcctcctcccacccctaggctgaccccagtcagggaggagggagaccccgccctgtattcagggccaggctttccgcatcctcccaaggaatccttccctctcattccatggctcctcccttgccagctgctgatcctaggctgcctcttcctttatgaatgtggcacagttaaggttgcacccctgagtgctgtcctagttccctaacacagcaaagccacagctgcctggagggaggaagggagggagggagggagggagataagacgggagtgctcagaacctggtaccttctgctgttcattgaatttacccacccagtgaggagggatttgcaggcttgagatccatggtgggggtcctgggcatggtcacgcagtggggagtggcaaagcctggacaggctgggtagggtcagcaccccatcgtgattgatgtccctgaggtgtgagatgggagaacctggacctcaggacctgctgtcctttatgtctcttgccaaggggtggagagagagaggacaaggccattgccccatttcagcatctccaggcctgaaaggagggtctggccatggcagggatactgagttctgggagaatatgatacatgctccttgcctccccatgcccccagctcccccagtgtcctgcacacacagccggccctgctttccctctggggccttgacccttcctctcaggcaaacgcaggtggtctgattccctccctgagtcctcagtccctttcctgggtccctgggtcaatgttctcctcacccggcatctgcctgggggggtccttcctctctggccaggacagacgtgactgcttaaggcctatcctcagctccccgtcctcggccgctcctaccacgaaactgatggagacaggaggccttcactccagtccttgaaaatggagtcccttccttgtcctttattctgcccctaaacctgtgatttctccctgcaccctcatgaataatcctgacctttcctagggccagcatccagcgtgacctcagggagcagccgcccccagcctccacccctggtgagtgtcccttcagcccaggtgtgggagcccctaggcctgccctacggtgtccactcctgccagtcaccccctgggggcctctgaccctttctttggggctgcaaggaggatgtcaggaaacatgacacaggggaccccgactgtcttgttcagactgatctgtgggctctgggtcgtgggtcacctcctcgacctcagctgctcaggtctcccctgggaagaggctccctctccctgattctctgggagctgaggacccctacactctcctgcaggaggggcccaggctctcctcccaccctgctgctcactcctgtctctgtccccaggccatggtccctctcacagatccaccttctcggtaagcctgttccctccccagcccttttctactggggtcccaacagtgcaggctcagggcagggggaccatcaaccccacagcacagcactgacccacctttccccagaacagtcaggtcaaagtgagtgcctccagccaggatccgggcctctctacagggccaggaccacccacgccatgtgctgacccctccccgggaccctctacacctgaggagaaccctggagtccagcaggtgcagaatggacactgggaccatcagtcagaggcccacattaacaagggtgcggggtgggcccagccaggacaggggtcagggtgttgtgtccacactgggaggctgagctcaggggcagagctggtcaatcctgaggggaaatgagtggaagtggaggcagggaagtaagtcctggccgatcagagacaggaaccttccaggctgggcttccgtgaccctccctccctgtcccctgacatctcctctctcccctgcccaggcccctctacccagccccagaacagccactcccatctatgaggtgagtgtgggccatggatgttctggtcccgcaggctccaggggacccaggatctgcccccaccagcacctggctgagctcagattcaggaaaatgcagtgaaaatgagaacaggtggtggtgagcagaggagggaggggcctgggaacagggaccccctgagcacagccaggttcagccccagagaagccctgggtgggcccagagcctgggagatgccagacactgttctgagaaggctacaggggttgaggcctcttctctgtttttacaggaattgctatactctgatgcaaacatttactgccagatcgaccacaaagcagatgtggtctcttaggttcctctgggagctgctcttgtgggttgatggagcgtccccaaagctcccagccctggggacggggaaggacatggagcctgagccagagaaccagctctgagtcctgaggagacacaggcctggggacagggagggatgggagtccctgctgaatatctggagaccctgacaggttgccctgggctctgggtgggccgggacaaaggcctctcatcaccacaggaagcgggggcttgcaaggaaagtgaatgggcctgtggcccacccggggtcaccaggaaaggatctgaataaagaggacccttcctctcattggctctttttctgctcacgggaacttagcagaaactcacctgaaactccgtgtccattctctcccgggtcacacagggaaaatatctccaccttgtctcaaccacagtctctcttccctgggaggcagaaataggggttgggagtcaggctggggtgggccctacacaggaaagggcaagattcacatgagccctgcccagccagccgagcgctcagctgtcctcacactaccccagggaccaaggccatgcacagccccagcctgggtccctctgtgaatgcatgtggggtctcaggagcacagaagatggggccatctgatgtccacaaaaggtgagcaatgcgggagcaaccatgggtggtataggttgcggctgtggcccctacgcagcctccagtgtcctgacccctgctgccctcttcacccaggccctggaggcccagtctatcactgtcctccacaaatgaacttacctgtccccaaatccaggatcctgtgtgcttatacctggccactaggttctcctctgtcccagtggctactgctcaggacatctttatccctggtggggcacagagaggggctgtcagagcaaccaagattaatacagacgcataattcagtccttgagcactacccaggactctggcccctcattgctcatcagttcccactttaccccctggcatggatctcactgagcaagccaactctttacacaggagcatccaggtcagaggtgcaggactcccccatctaaagctcatgcaggctcccatggcgatgggacaacctgtctgctcctctccctggcccacagccctatctcgcctgcagctcctccacacacctgggacagcagttctcagcccttccctgagggcccctggaagggtgatgatctcatataggttcacttgaaccaggtgccaccttcccacaagtgagctggtgcctgcactaaagcacagagccacagttcccaagagtgttctgccactgccacaggtcccaagagtgttctgccactgccacaggttgttcgtcctgagatgagaggtaagaaaacaacccgcaatgggttgttttatatcgggatttgcatcaggatttagctctaaatgacccctgatcccacctgcacacagcgtcagatgagacaaggtgaggcctctttagttttctgttgaggctgtgacaaattaccacaagcttagtgacatagaaacctgaaccaaagtgcccacatggctgtgttctttctagaggctccagggaagagtgcatttcctctccttttccacctcctagaggcctcctgcaaccttggctgtgtcctctttctccatcttcaaagccagcagcacagcatcttgaaactattctgtgccctgcttccatccccacatctccacctcctcccacctccctctctcacttaaaaggaaggagccttgtggttattttggacgcacctgggataaaccacaacaacctccccatctcatgatccttcctttaatctgtaaagtgtcctttaccacgtgacatgtccacagatctggggatgaggatgtacacatctttgagaggcccttgttctgtccatcactcctctcaaggccatcttctcatcatcgttcactacaaactacacatgggcacctggatgggttcatcatgactgtggcgtcagttcctgcattaacatccccagcaccctccagatcctgagagagggagacggagggctctccatgcccctagtacctctccaccttcttcttggtgacatgcttagttgctaagaataacagaaagcggaggtgactgaaagatcacaactcaccggcccttcaatagttcgtggacatcagcaccacggacagtgactcagtgaggctaatttccaggtggcagcagggagcatgcagataggagggaactgcaggaaaagctgcccattctattctatatgagaaagagtgtaagaaagaggaagctattacagggataatgctattcttctctaatccataaattgcgaaacctttgcatgtctggatatcatggtttttagcacatctgctgccactccctgcagggctgattgctgcatccaggatgtggtctcttggggggctcacagcctgctttggcctcatggtgagtctccctgcccctgacactcaggccactgtctctgcctacaacatggtgggaaccttccatgattaacgtctgattctctgtgcctgacctttgaagcacatccatcactcagcctggagcatccgctgagctcagcatcctgctcctccatccccagctgagcccttgaggagatgcttgagaggatctcctgggctcctctgtgagctcctccaggctgagccttgtgcttggtgtcagaggcctttgccatctgcttgttctttccataggcaaataatcctcctcagggacaagtggggcctgaagatctgtctgaatatctatctatctatctatctatctatctatctatctatctatctatcatctatctatatgtatgtatatatgagaatgctttattaggcaaaactgcatactatgaacatgctttaaaatgcaacaggatgagatgtgaagacataaagaacaagtgtgtagtgacacatggctatcagaacacactgaagaatccacaccgcggccgagagcagtggctcacgcctgtagtcccagcacttttggaggctgaggcaggcagatcacttgaggacaggtgttcgagaccagcctgaccaacatggtgaaaccccatctctactaaaaatacaaaaaatttagccgggcctggtggctcatgcctgtagtcctggctgttcgggaggctgaggcaggagaattgcctgaacctgggagacacaagttgcagtgagctgagatcgcaccactgcactccagcctgggagatagagtgaggctccatctaaaaacaaaacaaaacaaaaagaatccacactgcttccccgcttcactttacccagaaaaggaatgttctaggccacttcctcttcagcacacatccccagggaactaaaataggttcacagtcacccccatcttcctcattcccatcacctcttacccacagaggcatctctggtcctacagatccagccctgccttcaagaggcacaggtccaacccatccagtgtccctgctagtcacacacagcactcagggtacaatggagggcttctgtgctttggatgggaacaaaccccacctcacattcccacacctgagaagccaccagggtcctctctgtcctgtcctcacactcaatgtctgtcctgggtcacccttgtcatctctcctggaaataggcatggctcctgacaggtaggattgaggctttgtcttttcaggagtccctcccactctgagcacatgaaactgctcagctccatgcaaccctctctcaccaggggccttgttctctgggtccctgaatacctgggtccatgccatgtacattttaagaaaaatgacagtgactctcaccctgacatcctcacccaaggcacgtgtctgacaagaatcaccaggtgagatacctgtggctccacacacctgaggcttcactgcgcaggggtgtcctcatccctctcctcccacccctagggacagtaagcaccacaggctgccttggaccaccagctccccctcccagacacagcctcagatctatactgacatgctacatggagaggctctgatgaacagcaggtattaggaaatcccaccgaaccaggtgccacttgcggccccactcctcctcatatctgtgactgggacagacacacataacacacctctgttcaccgcccagcccccaaggtcaatcacagtctgcttctcccctagatccactgctccccatgtcttccgtcctcagctgcatcctgggtggcctccttgctgttcttgtaccccagaggcaggttccaacctttgtgatgttgcctgcaatgcccaaactttcccttccccttccccttcccttttcccctcccccttcccctccccttcccctccccacccctatcccttcgtcttcccttgtcttcccttcccttccctataaagccaaacatacccatccacctaccttgtggtcaaagtcatcagcctcctgctccactcagtgttctctgaccctgcatatggaggtggtggcccctcctagaacacccaccactcactgtcagccttgcgtggtaatcacagattttgcaggggttacctgtgttcaggtgtgtcacctgtggaaccagaactcttggaaggactggcagagggagctgcttaggatatctcagggctcctggcatctggtctaccacagggctattaacaacagcacttagggacaaggtggaggatggacggttaagagggtaaatatggatgatgtgtgggcaaagaataggacacaggaacacatgcagtactcaaataattatgccaagaaaggtgaggacatggagatggacattcccatatacttctgatgggactgcagtttagtccctacagcaacattgacctcatcatgtttaacgcgcacacgctctgaccactatcctacttctgaaggcctccctgtgctgtgagctctgagaaggccaagcttgcctgttctgtctctgctaaagccagagaccagccaatagcccagcacagggtacttcataaatacatgttgaaggaatgagctccaggaacagtactccacatggtagagatgtgtgtatgaggatgttcactgcagaaggtcatgtcaatgtgacaagtgacgagcagcctcaaatccagcaacaggggtgtgggtaaaagatcatagtgtagccatgcaatggaaccaatgaaaaaaccacaattagagcaaatccacatgtattaataaaggaggtgccctccatacatgctgcacctaacagaatgttgccaaataagaatgaaaaatgatgatatttgggctgtaaaaactagaagtcagctaaataagaatgcatcgaaagtatttgtgaatgcttacaattttataatgccttggcatccgttttggatggaagttggactttctcataccagaagcagggctcagtcacctttgaaatagtttccagttctccacctccttccagttcctcagtgtgattgatcagatatctgatttatacaactgcctcctggtgacctcctccctatgggacttccggatacagcccgtatgactgccccactgaccccacaccctgcctgctgcagtgaccacctctaattacctggatctcatgtctgcttgcattaaatccaccaattaaaactccctgaggacaatctgtttgaataatattctgtaccctaataaaggccttgacccatgggttccccctctgtcctccccatactgcccctgacctctgtgtgtgtgtgtgggtgtgggtgtatgtgtgtgtgtgtgtgtgtgtcctccagacagggcctgtatcccccaggacctgtaagtaataaatctttattttcatcttatgtctctcgcaatcattggcaagagctctgcatcttaaagatcgcaaatttaagaaattggtgtagtcggcacaatagagtacctcttctgtttagcacaagatatctcggagctgctgaggcttttaacatcctcgccggtgtggctgcctcactggtgaggccgttctgttcagtgcaattcagttgctccactgtgtgctgctgtgttgctgctgtagagtgctgccatgttgttctccccaaattgttaccgagtaggaacctgtaatgtgctcccaaggtggtctaccccatgagaagggggattctccatctagggcaagggctaggtgtgtttctggaatcctaatagggaaggcatccacagagggtgaactccactcctccttagagtgaggagtgacatttcccatttattttccccatggaggtgccatgtattgactttttctttcactgtcccaaggttgagccaaggtgagctatggagaccagggcaagataccatttctgttagcaaagcaaatgggtgacaacgtgtggagaagctgtggttctcctgatggatatagcagagtgccatttagtaaaatcttgtcaggaggctgcccctggttagaccggcagtgtctgtagtcactaaggtggatgcgaattttaggccctgggccatggataatccctgcagacacagccgtggcttcatgtgatggggcaatcccgggctagtggctcccttgtttctgcatttcttgctgtggttgcacaatcaacacctcaggggttgattgggtcaccttggaaagagaaacagctgcctaggaggctggtgcacatggaggccaccctcaattttattctgctaacaagttgtaagattaaaacaacagggggctttgggtaccatcaggaacttgtcaagtaaacatccaaagacagaaagaagaaaaagaaaaagacattaaccgtctagaaatacaagccattttaaagattttgcttaaaagatgcgcttgggctgggagcggtggctcacacctgtaatcccagcactttgggaggccaaggtgggtggatcgactgaggtcaggagttcaagaccagcctgaccaacatggtgaaacctcgcctctactaaaaatacaaaaaattagcagggcatggtggcaggtgcctgtaatcccagctacttgggtggagaatcgcttgaacccgggaggcagagacggcagtgagccaagatcgcaccactgtactccagtctgggcgacagagtgagacttcatctcaaaaaaaaaaaaaaaaaaaaaaaaaagacgggcttgtttcgtcgttgtggagtcatcccagagagaggctactccctagagtcactgaccacctttcctcctccatcttttcctcttatcattctagagacagaaaacaagaatctcagctttaggtggctaacctcaccccccaagaaaagaaactaccactttgattgactacaaatccaagaaaaataaaagagaaactttaaaaagtactgagcaaaccacaggtctagcaaacataatgctagccctaggttacttattcatttacaacaaacccctagatataggaggaaaaaataaaaggtaattaaatatatacacatacaatattttaatataaatatataataaatagttaaattatgtatgtataatatgtaactaaatcaaagtaaaatttcatactttgattctattggaaattcaaaattcatttattaacttatatattaaggaatttatgtaaaaaaagatttttaaaagggcaccaatttgcttttgtgtctctacaacataggatctaatttaactttacatttgctaaatacactaattgacaaatattcatggatttaatcaatactggggctcaaattgtagccacacgtgggaatcccataaatttaaacactctgtccctattatcttgagaagaaaactaaatataaaattgaaaaaaacaggtatgtctcaatttacctgtaactttgcctaaatttcccggagtcatatacccattgctgtaaaacattctctattggacataggtgctctgagacaataaataaaatagaagtgtttttggtacttagacattggcttgacaaaatgggatcccatgaaacctcagttaagatagtgaatacggcccaatgtgagttgaaatggggcctttaaggattaaaacttattacatgaaacctagtaagtaatggggtgattatccatactgcttctccatttcatagcccaattttgacagttgtcaaatctggaaaaaacaaacaaacaaacaaaaaaacccctgggaatctgttgcctcacagagacacaaagtagacatcaaaattgtatatctcagttccagttccaaaatggtggcatagaagcaagctggctttactccttcacacagaaaaccaaaaacaaatatacagcaccaaaattattaccagatatattccagaactcaaatatgaaaatgaaacagttttcagagccacagagaagtgaaaaaaactcccgacagatgacaaaagaatcagatttccccatctgtaatgtccctccctgccccattctgcctggtaccaggtgtgtggaaaattttaccccaactcatggtttctacactgggaaatgtaagatcaatgcgggcaaccagtttctgcacaatcctgggttccctgtccctgccttaacccacaagaagcattgtgagtgcccgaagggagaaatttccctgaggacagtcaaagagtggggaggcaggactaccatctccttccctggaaactctgctgtgtaactcagccaagggagacatgaaatcagactggtgtttcagcagctccatgttgtagtaggtttgtttcacaggtatcctgggcatggacatctagccagctttcccacactgccaggatatcccctttgggacctccctcagttaggaagggcacactctgatcatttactagggccaaggtaaaccctaaaggtaacttagagatgaaaaggaggtagtgacctagcagtaaagaactctaagaaaatctatccaataaaaatcaaaacaagccagacaaagactaaaataaataatgaatccttcaatgtaaagacctggacttacatccacaagaaacagtaagcaggtaaccatgatctccccacatggacaaagtgaggaacaagtgactgatcctgatgagatggtgatgtgtgagctctctaatcaagaattcaaaactgcagttttaaggaaactcaatgatcttcaagaaaacatggaaaagcagttcagaaatttatcagagaaatttaacgaagggattgaaataatttaaagaaaacaaacaggaatcttggaattgagaaatatatttgctgaacaggaaaatttattagagtctctcaacagcagaatggatcagaggaaagaatcaacccaaataagactcccccaaggcataaaataatcgaattctcaaaagtcaagggcaaagagaagattttaaaacagaaagagaaaagaagcaaatggcataaagaagctccaattctgtggcaacagattttcagtggaaatcatacagaccaggagggagtgacatgacattctcaaaatgctgaaaaaatattgacatttgagaatactttatccagtgaagttatccttcaatataaaggagagagaaagtttcctagacaaacaaaagctgagataattcacaccatcagactagtcttcctgtaaatactaaagggtaaatactaaatacttcaatgtgaaagtaaaaaaaaaaacactaacatgcaaaacaaccacaacaacaataacaacatttgaaggtataaaatccactggtgaaattaagtacgtagacaaacccagaatactcaaatagtaattgtggaaagtaatccaatcataactctagcatgagtctcaaaatataaatctatcaaaaacaataatacattttaggaggccaaggttggcagattccttgaggtcaagagttcaagaccagcctggtcaaaatggtgaaaccccatctctaccaaaaaatacaaaaatttgcagggtatggtagcacatgcctgtcgtttcagctatttgggaggctgaggcaggagaattgcttgaacccaggaggtggaggttgcagtgagctgagattgcactactgcactccagcctgggtgacagagggagactctgtcttaaaaaaaaatagctacctgtttggagaaaggtaatataaaatatgtaaatagagacaaagtcaaaatttgcaaaggatgaaattaaagagtagagtttttttggggggttttctgtttctattattttatttgtgatctaagataagttgttaccttttcttctcttgaagatactttgttatatctatgtttttggaagtcttatggtaactgcaacgcaaaaaatctatgatagatccactgaaaataaaaaacaatgacttaaaacatactaccagagacaatcaaccacaaggaagacagtaaaaaatgaagaaaggaagaggggagttacaaaacaaccagaaaacaggcaacaaagtggcagtagtaagttcttacttaaaaatattgaacactgaatataaatggactctattctccaattaaaaggcatagagtggctgaatgctgcctatatgctgcctacaagaaaccacttcatgtaaaaagatacaaatagactgaaagtgaagggggtggaaaaagatatttcatgcaagtggaaaccaaaagagagcaggagtagctatactgatatgagataaactacaaatcaaagactataaaaagagacaaagaaagtcactatgtaatgataaagcgctcagttcagcaagaggagatgccaattataaatatctatgcatccaacacttgagctcccaagtctcccaagtatttaaagcaaacaatagtggatctaaaaggagagatagactgaatacaatattaattaggggactttaacaccctgctctcagcaatggccagatctttcagacagaaaatcaacaaggaaacttcaaagttaaactacacactagatcaaataggcctaactggcatttacgggacatttcactaactatctaactgttacagaattcacattattttcatcagcacatagaacattcttcagaacagaccacatcttaagtcccaaaaccagtcagaataaattcaaaaaagtttatatcacatcaagcatttgttctgaccacaatggaataaaactacaataaatgaataactttctggacacatacaacctaccaagatggaagcatgaaaaggcagaaaaacccaacaaaccaacatgaaactgtaacaaaaggaaaacccaggaccgaatgacttcactgctgaattctaccaaacatttaataagaactaaaaccaattctactcaaaatgctttaaaaaattgaagaggatggaacactttcaaactcattctacaaggtcagcattatcctgataccaaaaccagacaaggacaggacaaaaacaaacaaacaaacaaacaaacaaacaaacaaaaaaacactacaggattgcttgaggccaggagtttgagatcagcctgggcaacatagtcagaaccaatctcttaaaaaaaaaaaaaaagaaaaaaattagccaggcatggtggcatgtgcctttagtcctagctactcgggaggctgaggtgagaggaccaattgagcccaggaggttgaggccgcagtgagccatgtttgtgtcactgtactccagcctggggaacagagcaagatgctctctcaaaaacaaaaagcaagctgggtgtggtggctcctgcctgtaatcacagcactttggaaggctgaggtgggagaactgcttaagcccaggagttcaagaccagtctggacaacatagggggactccatctctcaaaaacaaccaaccaaaacaaagccaaaaaagaacataggccaacatcactaacaaacatagatgtaaaagtcctcaataaaatattaacaaaccatgtttagaaacacatcaaaagagatcattcactatgattaagtgagattcatcccagggatgccagtatggctcaacatatgcaaatcaataaatgtgatccatcacattaaagagaaccaagaacaaaaaccatataatcactccagcaagtgcagaaaaggcatttaataaaagaatgggttgagggagtggagcccatagtcagagcagcagtggtctgggattttggaagtagaaagaagggcagcaccactggccaggaccaccagggaacacccccataggccctgggtgttgtgctccagggagggttccctctggagttattaatcttggtgtccactttgcccagctgcccctcacagggtcagggaggatgaagggaaagcttccttctaatgaaagttcagggactcacagttcctagagcctgtagggagaggaagatcttcgaggaagagcacctgggcattggggcgtttgagaggaagatctatgccaggtccaagtggacaacctgtggactctctctccagggacatacgggtatctgggaatctcctgtagcttaaagaggtaaagacctctccctttagcctgaggactggaggatgctggttcaggtgaatgagtcctgcaggggctggtacaggcctggagggtggtggtgtccagggccttgggttcacccttagcatgattcaggccgggcggtgtttcacatgagcaagagggcctgggttcattgcttcaggacaatggtgaaatctcatggtggaagaaatcttgtccttgccagtgcccagctttcatttggtcttggcccagagtgtcctccctagagaagactcttgtcccttcttcacactgcccttcagggatatgccagccttatgggataagatggggtggagactgtagatgtgggtgggaatctctccacagagtgctccttctctcagcggttgcaccttgtctcagggcttcagcttgaaatctgggatctccaagcccttccctccccagtcctggccaggaccacatgggcagatgcattgtgtgaagtgcatttcatttggggtgtcctctctgcatggcaccctcccgttgattctctttgcgcatgtcagagtgcaggcaccatccacacctcctgctggaggagggacggagctgttgactcctgagagctgatcatgtgttcccaccctcacacacaatcatggtccatcctctgagggacatgtgttgccaccactgtggagatggtgcaactgacagtaacaaacagtaaaatctggtactgaatgggaccttaagccaacaatgacaatgtcattccaaggtgtttcatttttattgattcaatgcaagtcacctgatttcattgactattcacaatagctcgataaagtaaatgcatcatcaccaccactttaaagaggaaaaaggtgcttgggcagtttgtgactactgtggtggctgctgcattgctctctggtaaagccaagtaggtggtgggtgcggcctctgggctgggatgatccaccctcctggtggtggcaggggagccaagctggagccatggcctgtgcagtggtagcagctgaactgaccgctgctgcaggatttgcaagctgttacattttgcgaagccatgaagcacataaaacctcaagtagaacaagtgtttcaaagtctaccaaaatctgccttcagagattattactacagaggtggatatgaacccaaaatgacaaaacgggaagcagcattaatactagataatgaatgaacactagtaatagtagggtaagccctactgccaataaagaaaaaaataagagatgctcattaacatgttatgctcttaaatcacgcagacaaaagagggtctccttatatagtagccacaatcaatgaagctaaagatttactgcaagatcaagctaaaaacagtaggtgtataatgaatttttaacttcatattagtttatgtatatgaatatcaagtttttataataaaatgcctccaaacaaagaatatttgatttagggtttaataacttctaagaggggactcagatgtttcctgtttcacagtcagtctgagagggtcatttttcctggagctgacctgggtggaggcctcacactgatactccccagcatcctctctcctgatggggtttatgctgagcatacagtggccctgggacagctccattctctccatgagtcacagacgctggtcatggaagatccactggataaggttccagagtcatctgtggggcaggtcaggatcacaacatccttttcttctgtgactctggtgttgctgactcagatggggtcggagccactgaccctgtggacaatcagtggaggtgctcaactgaaagtgggctgagggcacgtcttctcctccatccctgggtccttaaggtaactgtggaccccagaccaactgacacaggagctagaaagaaattatttaggaagttagtgagggtaagagcgtccttggcaaggtttcccctttaacaaaaagcagcccaagataattccttttctaacaaagagcagcctgaaaaattgagctacagatgtagatgagcaagatggaagcttgcacaggtgaattccagtaggtgtgccaatagaaaagggctgcctggaagccaggtatgttcaacatggagactccatcctcccttttctccattaccacatgtacagtaaaaaaccaggcaacatggcaccggccaggtagacaatccatctgcatgacaaaagatcagagtggggcagccagcaaatggcacagctggtctaaacaatctttcaccccctgtataaatcagacactgcctcctgaagctcatctataaaaccttctgcatttcactatggaagtggcaacccattttccccaggacccctctctctgtgcagagagctcttctctttctttcccctatgaaacttccactcttaacttcactctgggtgcctgcatcctagttttccatggccatgggacaatgaacctcgagtattaccccagatgaatgatgctgtttcacaatcactggttcagctcccttcttcttagggtttcacagctcggtggggagaataccacgcctcagtggtctggggagtgaggaacaaatgaagaattaatcagattttacttagaacgctatcacctgcctcaaccatcagatccatgttgggaatgtccaggcctcctctcttagatctatacccacttcactggacctgaaatcctgtgtttcccgatgtgttggtgtcactcctatgagaggataaaggagagaactttgctttctctccccactcacaccctgcacaagacagggcccaatatgagacacacactcgctcagtagttctctcatgaaggagggagggagtgacctcgagtgattctgccatctgtagtctgtgtaccctggccagtggctgtatcttcatatgcctcagtttcccctcagtaaaataggacacacaatgagaactaaaaataaaattctaattccccagtgaactgaaaggatggcctcttggccaagcggatcccagagttcctgatcatgacaggatgggaggttacacctcattacagcccctccctttggaagtttagaggtgacaactgactagcattaacgctaaaatcgagatcatgagactgacagaacagactctctgtggccataagataccaaattataaactcaacctaaggtcatgcaggcaagggctaagccacactttcctacatttaaagaataagctatgttctaacacagaattttctttctctctagcggctaaagtaacactagccttcgagataagcaatattgaaatgatcgcggctcatccaccaacactggctaactgacccctgttccaacagccacaactacacttcaattggacaggagactgatttcagtaactttctcctaataagagaccactgagcatggcctggttctgctggtatacagacacggtgcactgagtaccataatgcttgtttcatcttttgatgtataagacctaatttaatacatttaaatctgaattctccaccccaaagtgaacatggggtgcatgtagcatgcatgtttgttgatcacgcatgtgcgtgtacttcctttgtgagtatccatagctccacctataacctgttgaatatgtatacctggccaactcattcagcataaatctatcttccacattcccctcccttgaagtgcctgctattggtctctgctggaggctgcatcttctaccctggggaatggccagcctgcaggctgtaaccctgtgtaagaaataacctggttgggtgcagtggctcacacctgtaatcccagtggtttgggaggttgaagtggtagaatagtttgagctcaggagccagagactagcctgggcagcatagcaagatcctgtctcttaaaaaaattttagggaggagagtgaggatcagaaaaaatacctattggctattatgcttagtacttggatcatgaaataatctgtataccaaacccctgattacatatataacaaacctgcatgcgtatctttgaacctaagataaaagtttgttttaaaaactatctgggtgcagtggtgcatgcctatagttccagctactcgagactgaggtgtgaggagtgcttgagctcgggggattgaggctgcagtgaattatggtcccacctgtgagtagccacttcactcaaacctgggagacagagcaagaaccggtctctaaaaaaaaataaaaatagaaaaataaaatgaaaaatatatgaaataaagtctcctttccaaacgtacagatctccgatttttctgccaacaatgataaatggtcagtggcttgccatgttgtctgtgaattacttttaaaatattcacgatcacctgacctaaaggttggtaccaaggaaccgcctgaatacaccgtctctgattatttgcctccaacagagtgttccctgggcctgatctctggtggacaatgagctgctgggaacatcctctcttctctattcctcccctggggatgctgaccttcccttggagtctcctaagttccccagggcagtcggctaatgtcctagggagcttacctgtcttctccataccaagtctcatgtgaaggacgaggctttgcccttgcccagatgaggctctgggggctgagccctggctggctaccagctgcaagagccatggcccttggacagctggtaaatccttgttcccagtcagccctgcccaagatgcctcaacccagccccggcacaggcttcccagggtcacatggagtcaggatcctgggacaggggactggacaggggtttccagggctgagtttctgaacaggggcttcccaggggtcccctcactccaggatctgacatggtcctacaaggaacgtccatggggaggggacccaggagggggaactgacactgacctccccttactgagcctccccccaaccccatcagactgtccttcctctgtagcaagtgcctgcagggtctggatgcaggaaagaaattctgatctgtggaagtttgtctcccctgtgtgtgtcttgcactaaatgtccaaacccccaaatgggatgtaatgtagagggggacacaggcacagcccaggcctgaaaatcctgtgtgtgtgaagcagaactgacccccaacacccagagctcatgagacatcactgtgtacgtgaaactggccagttacttcttcattcacaagatctgtttttatgacttgtagggtgtaggatcctgtgtcattgttggtgacattctgtatcagcagacatgtattggggtatattgtctctcagcctctgtggcaggtcctggggtaattacttgagttcctagtacatatcctgtaattcccctttgtaccagttgtagccaagcctaaggcagattgtgggtgagtggaagaatctccttgccttctgcagcttcaacagtgacttgggcagtggtaggcaagttccagaaagttaaaagtgaggctaggagtggggagagagcatcagttaatactgggccctatgcattgaggtggaaagatggggccctaggtcctggacaggtctcttcatccctcagccttggagtgtgtgtgtgtgtgtgtgtgtgtgtgtgtgtgtgtgtgtgcgcgcgcgcgcgtgcgtgcgtgtcctactgggccaaggtcagcagcatgacctcccttccttcagtgcctctgaccttggcatttccctgtttggagtccttttccccaggggtctgcctggctccctccctactgccttcaggtcctgctcacattagggcatccttgggagaccccttccctgacacctctagagaccctgggtcttccctttctgacctttcgctgctgtgttccctccagggctcttgtcaatacttgacctcacattctagatacccttgcatgtctgtcttcctccctatgagagcatgagctctgtgagaacagggacttgtgtgatcttggttgcaccccagtgcctgggacaggctgcggactcctgtggatgagctcatgagtgttcccagggcccttcacaacgtgggatttattttccaatggctgaggttgttggctaagagctctgttggagttcaatcaggctggtgggaaaaatattagagatagttatagagatagacacaaatcttcttggaagaccaaaaagtttgcataactttggtaatagatctgactgaaggtggtccctttacctttagttaaacaaattaaagtagtaacaaaggaaggcagagtagtttgtctagccagcttgtttactcatgtgatcttaagactaaccattgatgtgccacaggtgcttaattgctttctacttgggaagtccacaatgtcaattaccctctaacggtgttgactcaagcctttgttaattaatcttactgaataaatatgagtctcactagctgatcaaggccatggtcacaactgtttataggactcagcagggagtctgtaagcggccctgacagactcagctggactggcaaagcaaaatatgtgtgtgtcagtgtacactattcacccgtcccccacagctggtgcccctatatgaggagtgctgccacagagctctgtttagtgtcccttgttttttttcttgagtattaccccaacttaaattgtgattattgtcatctgttttcaacattaactgctcagtgatgattcacttggaaaacattaacaatcgagattgtttcttcactaacaacctcagattatttagattttcctgttgtaatcccttcttcctgtttagtgtccaacagaagccctctgtccctctcaggtccccgttctctccaagaaaccccagccagtctctgtgctccctcctcccatccactcccagggagccctcccctcacctgtgagcagaagcgcctgccagggatgtgcactctgtgaggaggggctgagggaggccccatgggctctgctgtctgctttgtcctcctctgtggagaggagcttgggcttcagaaaataaggaggccagaaagtaaggaacaggctgagaaataatggggatgtgtcgaaaggtcacagatgccaacatctttgtcctatgcaatattatccataaaattacaggtttgagatatgcttaaattttcttctaacatgcattaaaataaacatataacttttaatagttatattaaattgtatttaatataaattaaatgctcttgtcagagctactgtgactgtcagctctgctgtccttcctctctctgtgctaagcctcctcccagggcagaagcacttcccagggccaggggtgggggcggggaaaggtaagtggcaatgaggatctgcacaggtagcctttccgcctcctcccctctcagtcctgcctccttgtcttcttttcctctttttctccaatctacatttcagttccttagaccacgctgtgagaagcaaggcttattgggacccccatcccttaacaggatgacctgtgctccccataagtgacctctgctgtgtctagggattggctctgtcagcacctcacagagagtccctggggcccccaaactcagtgttattttctctatgacacagaaacccctctgggtatgcaaggttttcctcatgttttctaatgtctgggaaggttggatttactcccagcagggaggtcacagagatgtccagggagtggggtcctagaaatggacaaatctagagctaaagcccaggtctacgattttcagttgtttttttctgcagtgctatgtgaccctaatttcctaggagtaactaaaatgcaaacctcagacatttgtagacattttatgatttttctctacagcttgtaccactgttattattatttgctttatgctttttcctaaataaatttactttacaaaacatccttgtcctagtagggtgcaggggctcacgtctgtgatctcagctgcttgagaggttgaggtgggtggattgcttgaggacgggaatttgagacaaaacatctttgtcctatgcaatattatccataaaattacaggtttgagatatgcttaaattttcttctaacatgtattaaaataaacatataacttttaatcatcatattaaattgtatttaatataaatttatatacaatacatttttatataataaattatatatataaatgtatatataatagtttttcttttttgagatggagtctggctctgtctcccaggctggagtgcagtggcacgatctcagctcactgcagcctccgccttctgggttcaaacgattctcctacctcagcctcccgagtagctgggattacaggcgcctgccgccacgcccagctaatttttgtacttttttagtagagatggggtttcgccatgttggccaggctggtctcaaacacctgacttcaggtgatatgccgcctcggcctcccaaagtgctgggattacaggcatgagccaccatgcctggcctatatattttatataattatataaagttttctataataaattttatataataatatataaaatggatatttatttaagataaagttattagttttatatatttacatatatttaggaataaatgtgttactgtgggagcccagtgcccaggcaggtagtcagtacatgatggttgtcattagggttaatactttggaattctggattttttcccaagagagtgtctacgctggaatattgggcttgtggctttctgctgatgtgcatgtgtgaagaagctacttccacttattaggacttgtgtatctgtctcgcagtttcactacctattttctcgtgatgttggtcaagtcgcctaacttttctgtgcctcatttacctaatttgtagaatatgggtaacagtacacaagtgtgagtgtgtatttcccaggactgaccactagagggcgtgaaggcaccggcacttactattacagcaatgggtgtagtagtgctcatggtcgtaaacatcattctcccatgaaaggaaccagggcttcctgggagaaataactgattccagggctggggccggaaagcacaagcggagcctggagcatctcgtgaggccagaaagtaaggagccggctgaaaaataatggagatctgtcgaaaggtcacagatgccaaccagaaggagctttgaatgaccaattttgagacaaaatgagcactataagaaataatgatagtaataaattccaacccataaatacccatgagttcctactaatataaataaataattgaatacataaatatataaggatgaagaaacagctttttcttacagcagaattccaattaatgaatgtagaaggaatgatcaaatagaaaatcactatttggctaacagcacagtcaattgtttgtaggcaagaattatcaatggactttaaatatgaatgggtaaaagtatgatgatgctacaactagtgagtaccaagggggaaaaaaaagtacgttgagaagaaacaggctacttccatattcccaaagtatcacttcaggagctacttattgattataatgggacaaatagtaacttacagtagagaaacctggcaacagagtctctccgaggtacaaaggctctcttcaggaaggaggtaaggggaaggaagaagaaaacactgtcctgcctcaattatttgctttccccattctcaagtgtacttcatagacattcaaagatatgtgttgatagtgtccacgatccacatggctctattatagtcatttattcacacatacattcagtgaggctttgagtgcctaatgtgtgcctgatatttgctagatggtggatgctgagaagatcaggtgtgctgctgtctctagggtgactgaatccacctgccccactttacagatgtggaaattaaagtgaaaaggatttataggattagttcactgtcacaaggtcactagccttaaagttacaggagtaaagcaagtttcctgacttgctagattttctgctgcaggtgctgacaatggtgagctccaataggagagaggacactcagagtgaagtgggagccctgaacaccctggattagccaagaggacatgccgggtccagctgtgaccgcacaaaggaccattggggatatttgtattctctttttcacttagagcttgaaatgaggaaaactaagtgcagaaaaccaagagtggaagatttttcacaaagcactggtaacatgcatcagaaaaccctgtgctgatgtctgtcacggtgtttctcactgaacggtaatagtctggctttgagtgtgttccctctacagcctggagttctgcgaggcagggaccaggtgtgattcatctttgtctctccagtgacagtacacagcaggctctgataaatatttcttacaaaataaaatggaataaaaagtagacatctgcacaggtgtgggatgactgagcagcagcagaagcaggaaaagtcagcgtccccagatcagctgatgtggtgttcggattctagataggggtgaggtgccaggatggggatgggggtcctgtggctctgctgccctgggggacacccctaggtttcacagtgcctgctgtggttgctgcactttgcttccccatgggaaagtgatcagagggtgtggggcttcaggtgaccccatgtgggaaatggccaagggaaggtggggtgggcggcacatggttttttttaaccaatatttgaaggtaggttgtatgaaaaggtgttaggcttatttcagcttatggggagtaggacagggattggtgagtgtgtatcaggtatattttggctcaggatggaaaagaactgtcacagtaacataaggtcttttgggaaattacatgtttactggcagagttcaggccagggctgggtgtctgaaaatacctgtcagggtcacttttatggttacaagggcagagcttggcttggaaccaggtttcttactaataccacatattaagtattataaaaactgtcctttgcaataggacattgctctatgatgcaggttgaggtccctctgtttaagtaattgtgggtggctgtgattctctcatctagtctgcgacttggacttcacctccatctgcagtccctctcctttgctgttgacactggtcagagttaagcgcatttactgacgatggtcacagggtggcagcactgcctctctggtattttctaaaacctcttcctggaactgagccagtctaagaggatgtcatgactaagaaaagggcactaatgaggtgaacagataattttttttttcttgtttctcctgtgaagtaacagagtggaggtgagcatggaataattgccttttagaaatggaagacaatggagagaagtgtttcgcaaaccttaatgtgttcacagatcccacacagatctttttattcaatacagattctgatttttctggtgaggcctgagattgtgcatgtctaaggagcttttggatgatgccattgctgctggttggcggaccacactttgagtagcaaggctcgaagatcatttagaggttaattctcactgcatctaatttatggatgaaaacaaaccaaggtccagagagagcatatacagcttgcctaacaaagccattccctaagtgcctgacttcttgcatttaaacccagggcttcagcctttgtccagttctcactccacacatcacacggtttgttcactgttgtgaacgacagttgtggcagcatctctttagtttaggaatccagagccccaatttcactaccctctttggtcttggctcatgctgtgacttcgaatagttttgcccttacttaaaatcttcagtggctcttttgtaatcacaagatcaagttcgaatatctctgtctagtgttcatggctttataacatatggtatctctttagtaaccttacctaacttccctgttttaaaattgtctcttgctgccatagccctccttgctccttcctgctccctaacaaactgtgttcacttctctctcagtggtagtgatgatggcatggcctctgatgttagactcatgtaacttctaatcccagatccaccaccaacattggcaagttgattcatctttctgaggataagcatcctcctctgaaataaacttagatggcggttgagaggggtaaataaaataacacacaaacccactctcatccctgagaccctcttcaaaactagcatataaaaatagctatttgaagaggttcagtgaaattcaaggtaacacagagaaggaattcagaatcctatcagataaatttaatagactgaaataatttttaaaaatcaggcagaaattctgtagctgaaaaattcaattgacaaaccgaagaatgcactaaatctttcaacagcagaattgatcaagcagaagaaagaatttgtgagcttgaagagataatatatgaaaactcagagtcagagagacaaaagaaaaaagaattaaaagaataatgcatgcctacaaggtttgattattaagctactcaaagagatacaagagaagggtgaaaaccaacataaagaaatgtaaaaaacaatcagaatataaatgaaaaattttctaaaatgctagctagtttttttttgagacaggctcttactctcatcacccatgctggagtgaagtggcacagtcatggctcactgcaggctcaacttcctgggctcagatgattctcccacattagccttccaagtagctaggactaaaggcgtgtgccaccaggccaggctaattttttgtatttttagtagagatggggttttgccatcttacccagggctggtcttgaactcctgggctcaagtgatccaggagattcactgccaaaaaggatataaccaagtcatatagtcataggttatctaaagtcaatgtgaaggcaagaattctaagagcagtgagacaaaagcatcaattaacttataaaggaaaacctatcagtctaacaccagatttctcatcagaaaccttacaaaccagaaggtattggggtcctaatcttttggcttcttaaacagaatagctctcagccaagaatcttgtgtagagtgaaattatatttcaaaatgaaagagagaaatacagtctttttcaggcaagcaaatgcttcaggatttgtcacggctagaccatcctacatggaatgttaaagggacttctaaatcacaaaacaaaagatttaaatagaacagaatagaacctcttgaaaccaaaaaattcaaatggcctataaaacaataacacaataagaaaacaaagtagataacgatcaacatgatgactggaacaaatattaacattgaatgtaaatgacctaacactccacttaaaagacacagattggcaagataaataaaaaatcacaaaccaaatatcagctgtcttcaagagactcacttaacatgtaaggattcttatagactcaaggtaaagagatgataaaagatattccatgcaaatggaaaccataagtgagaaggaatagctatccttatatcatataaaacagactttaagcaacaacagtaagaaaaagacaaataaggcaactatataatgataaaaggatcaatcaaacaagaagatattacaatcctaaatatatatgcacctaactttggagctcccacattcataaaacggttatgatgagacctaagaaaaaagatcaacacaaaacagtgagggtgtcctgggttttctttttattggacagcagtgtactagcctatcactttcccagtcaggggatttttggtctccccattcccctaccatgggttcatgccaaagtccatattttttattagtgtttggaattggattttttttttttgaggtggagtctcgctctgttgcctaggctggagtgtagtggcacgatctcggctcactaacctctgcctcctgggttcaagcaattcttctgcctcagcctcctgagtacctgggactacaggtgcatgccaccacacccagctaatttttgtatttttagtagaaacgagatttcaccatattgtccaggcttgtatagaactcctgacctcatgtgacagggaaacaggcactcagtgaacttcatgcgattgaggagttaatgataatgagagaagggctgtgaggggacagcactggggacaccagagcctgtgacgggctgagttgctgtgccttgggagatgcccttttgactgagccctgggaaggagggggtgtgggggcaggagctgcctgcagagggagtggcctcaggtgggcggccacctggctgcagggaagaggtgacagagttcgtgtgcagagcttggagggtgaggaggaggtgggttgaggtgaccttggtgagggtgaaccatggggggctgtgggccctgctgagggaggccagccagccctggacctacagggtggtttggtcttttttgtcccattcccagcatccactgagtggtgaaactctgcaggccagggaccatcccactggccagaaggagcgcacagtaggtgcccactcagtgcatgttgggctggacagaacctcactctgccccctgcccccagctttgggagctgcagcaaggtccctccccctagggatctccatgcctctgtctctgaggggtgagatggggagacttcaaagggccatctcagagtgtgggggatagagacgcagaagtgtgggggatagagggaggcctgggctctagacccaaaggaccttacacacctcctgagtcttttcaaatggtttcttctgttactttaaaaatgatgtaagtcatcatatttattgtaaatcccaggaatctaatcatgcgtaaaataaggtgtcttatccttgaccccaccccttccccaattaaatttccaggatgttaccactgtttgcagttggtgtgaatctctctttaataatactctgtttatctcacttgtcgttttacgccaaaatacccattgaattatattattgctgaagaccattcttttttttttttttttttttgagatggattcttgctctgttgcccaggctggagtgcaatggtgtgatctcggctcactgcaacctctgcctcctgggttcaagtgattctcctgcctcagcctcctgagtttctgggattacaggtgcacaccaccacacctggctaatttttgtatttttagtaaagacagggtttcaccatgttggtcaggctggtctcgaactcctgacctcatgatccaccctccttggcctcccaaaatgctgggattacaggcatgagccaccacacctgcccagaccattctgttctactgaatcatgtgtggtgggcacctcttatatcaatacatatggattttatcttgtgtttgttattggctcccctttttctcattgcatggctacactcaatgctttgtccacacccctgttcctgggttggaatcttgtgacagaaaatgaagtaacaaaggctaaagctttctaaagtggagtcaggagattgcaagacaattgcactttcaccagcaagagctcaaaccacagaatgttccaatagatttggataaacagctgaagtcagtattcaccagccttcaacatctcaactaggagaaccctaaaattaactaagcacatagaatggaatggacttgtgatttaggattccttctcagccaatgagctgcttctgaaaacaactttttgtggaaattacctgtaaagaaaaccctctcctgtgcttgtcttacagaacactagtcagggctgccctgattcagtggacccgaattgctattatttgtttcctaaacatatggtattttctgtgaccttcatctcaatcttttttttaagttactgggctgtttcccagttttcataatgacgagacattctgcagtgtttcatacacatgtcttttccccatgtggagtattgatccaggagctcattcagtcaacgcatgtttatgaagcatcctgtgccaggctgtgggctggtcactgtcttcagcagagagaggacaggcacagtcttgccttcacagagctcacagctcagggaggctcttagaagtgggatactggtcggagcatgtgcacattaaacatgatgaggtcaaggttgctatagggactaaaccacagtcccaccaagatcgcattgagttcctgtggtagaccagaggtcagggcccctaagatgtcctgagcagctccctctgctcagaagttttggttccacaggtgacacacctgagcacaggtgacccctgcagaacctgtgattaccacccaaagccaagagtgagtggtgggtgttctaggaggaaccgtcacctccatgggcagggttggggaagactgaggggagcaggtggctgatgactttggccagaaggtagggggatgggcaggtgtgcgctcatagggaagggaagagaagggagggcattgcaggcaacaacacaaaggttggaacctgccttcatggactgagaaaagcagggagtccacccaggctgcagctggggagggaagacatggggagcagtgggtctaggggagaagcagactgcgattgaccttggggactgggcagtgagcagaggtgtgttatgtgtgtctgtccccatcatagatatgaggaggggtgaggccgcgggtggcacctgggtcggtgggatttcatagtgcctgctgttccctagagcctctctgtatagagggtcagaatagatctgaggctgtggtctgggggaaggggctggtggtgcttaccatctctaggggtgggaggagagggatgaggatgcccctgagcagtgaagcctcaaggtgtgtggagccacagttgtctctcattagacatgtgttttgcgtgaggatgccagggcctggtggttattactgttgtcaagtttgcatgacaaggacccaggtatccagggatccagagcacagggcccctggtgaggggatgaggctcagatggggctgaccaggttcatgtggtcagagtgggagggactgatggagagacagagcctcaacccctcctgtcaggagctgtggctatgtccaggagagatgacaaggatgacccaggacattgagtgagtcattgagacattgaaggtgaggacagggcagagaggaccctggtgactgctgaaatgtaggatgtgaggagggctctgacccatgcaagttacaggacctccccacccccgagcccacagatgacccttaaattgggcatcctgagtgctgtgtgtgcccagcagggacactggataggctggacctgagtctctgtaagggcagcgctggtctgtaggaccagagtcttctctgtgggtgtgacgtgggcaggaattagcaagatgggggtgacaaggcttggcttggaggatctggtacagaagcccatgggcttggtcagctcagcttctcaggggctcagctggggctggaggagcaggatgctgtgctcagggcatgctccaggcagcgtgatgtgtgtggttccagggtcaggcacgggggtcaaaaattaaccatgaaaagttcccaccttctgtaggcagagaaaatggcctgattgtcagggtcagggagacttaccatgtggccaaagcaggctctcagcctcccagagaccacaccctgggtgcagcactcagctctgcagggtatggcaatagatgtgccaagaaccccaacatccagatgcatgcaaaaattttgcgatatataaaatagagcagatcaagtttccctgcaataacgttgttcctggttgtgtctttttcttgtaaactagacatggacatctttccagcagtctgttctcatctgccaccttcctgctgcagcacctcagaatgaacattcctgagacactgtccgtggtgctgacgaccaagagctatggaacagagtgtgatgtagaatcttctagttacctctgctctcctttcacttttaacaacagagcatcattaacaatgagaaggtggagaggtgttcaggatcttgaagtgacttctgtcttgctctcccataaccctgaagctgctgtagacattattgcagaaactgacaccacagtcaggatggccttgtccaggagcccatgtgcagtttgtagtgagcaaggatgagaaaatggtcttgaaaggggtgatggacagaacaggggcttttcaaaaatgtcacatcatcacccccagcatccgtgaatctgtcacatggtaagagaccttacagattaaatgaaggattatgagtttggaagattattgtagtttatccagatgggtccaacataatcacagaatcccttccttacaaatgagagagggaggtgggagagtcagagaaggaggaggagatgtggggatagatgcagaagacagagcggtgtcaagatgctgcactgctggctttgaagatggagaaagaggacacagccaaggatgcaggaggcctctaggaggtggaaaaggagaggaaacgcactctgccctggagcctccagaaagaacgcagccatgtgggcaccttggttcaagtttctgtgtcacttagcttgtgggaatttgtcacagcctcaacaggaacctacagaggagtcaccttgtgtgcaggtgggatccagggtcatttacagctaaatcctgatgtaaatattgcaggttgcttttcctacttcctatctcatggccaacaaccctggacaatggcagaacacccttggaaaccacggctctgtgctttagtggagggaccagcttgtttgtgggaaggtagcacctggtccaagtgaacctacatgagatcgttactctccccagggccctcagggaagggctgagaacagctggcccaggtgtgtggaggagctgcaggtgaggcagggctggaggggcctgtgggtccaggtagaggggcagacaggttgtcccatcgccatgggagcctgcacgagctttaggttggggaaccctgctcctctgacctggacgctcctgtgtggagaggaggcttgctcagtgagatccacgccagggggtaaattgggaactgatgggaaatgaggggctagagtcctgggtagtgcctgggaggaccttgctcaaggactgaattcttggtctgttcccaccttggttactctgacaacccctctctgtgtcccacggggataaagatctcctgagcagtggccattgggacagaggagaacctggtggccagagctaagcatccaggatcctggatttggggacaggcaagctcattgctgggggacagtgatagatacggcctccagggcctgggtgaagagagcaggagggctcaggacactggaggctgtgtggaggtcacacccacgatctgtaccacccatggatgctcctgcattgctcacctttgtgtggacatcagatggccccaacttttgcactcctgagacatctcatgcattcacagagggacccaggctggggctgtgcatggccttggtctctagggtagtgtgaggacagctgagcactcagctggctgggcaggactcctgcgaatcctgccctttcctgtgtagggtccaccccagcctgactcctaaccccctactcctgtctttccagggaagagagactggggttgagataaggtggagatatttttcctgtgtgacccaggagagaatggacatggagtttcaggtgagtttctgctaagttcccatgagcagaaaaagagccaatgagaggaagtttcccctttattcagatcctttccaggtgaccccgggtgggccataggcccattcactttccctgcaagcccccgcttcctgtggtgatgggaagccttcgccttggcccacccagagcccggggcagtctgttgaggtctctatatattcagcagggacccccatcccttcctgtccccaggcctgtgtctcctcaggactcagagctggttctctggctcaggctccatgtccttccccatccccagggctgggggcttcagggacgctccatcaacccacaggagcagctcccagaggaacctaagaagccacatctgctttgtggtcgatccagcagtaaatgtttgtgtcagagtgtagcaattccagtaaaaacagagaagaggtcttgacccctgaggccttctcagaacagggtctggcatctctctctgggcccacccagggctactctgggactgaacctggctgtgctcagggggttcctgctcccaggcccctccctcctctgctcaccacctcctgttattttcactgcagtttcctgaacttcagctcagccagatgccagtggggacagatcctgggtctccctggggcccaagggaccagaatatctgtggcccccactcacctcatagatgagagcagctgccctggtgctgggtaggggaatctgggcaggggagagaggggtgtcaggggacagggaaggattcctgctgtgtaggaattccagggctctcctcaggtgatggagggtcccagggtggggttagcacagggagtggatgatcctggccctgaacagaggcccagctcatggccagggcaggtctaaccttatccaagtcattctgggtagggtgggtttgtgctggggattgacagtccccctgccctgagcctgcacagctggggccccagtggaaatgggattgggaacggacagtcttacctaggagatggagctgtcagagggtccatggcctggggacagagacaaaagtgagcacgagagtgttaggatagctgggcccctcctgcaagagtgtgtgggggtcctcagttcttagagaattggggagagggagcctttctcaggttattttaggggtcaagtaagcaagtgaggttgaggaagtgacccatgacccagagcccggaggttagggctgacccggccagttggggtttcctgtgtgatgttttatgggatcctctttgcagccccagggatagggtcagaggcccctgggtgtaactggcaggagtggacaacttggggctggcttagtagttcccagccacacccagactgaagggacactcaccgggggtggaggctgggggctgctgctccctgaagtcactctgatcgctggccctaggaaaggtcagggttatttgtgaaggtgcaaggttaaaagtcacaaattggagttaaaataggggaccaggaaaggagcctatttccaagaggggtatggagacctcctttctttatggagttctgtggtaggaggggcccaggtgaggggagttgaggaaaggccttacaaagccacatctgtcctggccagaggggaaggactctcaggcagatgctgggccaggagaacattgatccagtgacacaggaaagggactgaggacccagggaaggaatcagaccaccaggggttgcctgagaggaagggtcaaggcaccagggggaaagcagggccaggcacatgtgcaggacactgaggggactgcatgcatcttggattctcctggaactcagtgtccctgctgtgaccagacactccactcagggctggagatgctgaaatgggacaatgatcttgtcttctgtctctgccctttggcaagagacataaacgacattccaggatatgccatattggggccccggttctcccttctcacagctcagtgtctgcagttaccatgtcagtcaaaggggtgctgaccccacccagcccgtccaggctgttccagtctccactatgtgataatgcccaggatcccccctcagatgccctctcactgggtggatggattcagtgaacagggggaggtaccaggtattgagcaccgctcccccctgctccaggcagctgtggctttgctgtgctaggaaactaggaccatgctcaggggcatggccttaattggactgaattcactgaggacaaagctgttgaggaagcagcccagggtcagcagctggtgaggaaggtgccatggaatgagagggaaggatccctggggagtcgggaggctggggagagcctggcactgaatacaagacagggtctccttccttctcgcctggggtcagcgtgaaggatgggagcagaatggggaaaagctgtggtacctgccagtttttcggaggagcaggaaacacacaagtgcagccaccagaagactcccaaccaggaccccgatcaggatgcctagagtgttgtcatctgctgaaagaagaaggcaaaggggatgaggtccaaatctgttccagggggaaccatgaggggccttgcagggcaggggcatggtcagggaggaaggaaatgccatggagcctgagtgtggtctgttgtgctgtcctcatagctggctcccttgctctccgtggttgcaccattttctgtgtcttaggcttgaattactgggatgcatcaactcctacattctcccacaggaagcctgcacctcatcctgctcctgtgttttttagtccctccttcctctcacatcactcctcttccccctgtttctttttttccatcccatggcagtcgtaaagggcaggcccttgctgccaactcaatgctgatgagcagggatgatgttcattgactgttttcaggggccttccacatggaaggcacagtgggaatcaatctacctgcagcttttctcaccctcccattgccttgagggagaagggtatgtgatattgtgaaatacgtatttggtgttcatcaccattgatatggttaggctctgtatccccacccaaatctcaccttgaattgtaataatccccatgtgttatgggagggaccttgtgggaggtaattgaatcatgagggtgggttttttccatcctgttcttgtgatagtgaataagtctcaggagatcagatggtttcataaagggaagcttccctacacatgtcctcttgcctgctgccatgtaagacatgcctttcaccttccatcatgattgtgagacctctccagccatgtggaattgtgaatcaattaaacctctttcttcatacattaccaagtctcaggtatgtcttcattagcagtgtgagaatggactaatacagtaaattggtaccagctagtggagtgctgctataaagatacctgaaaatgtggaagtgactttggaactgggtaacaggcagaggttggaacagtttggagggctcagaagaagacacaggaaaaaagtttgaaacttcctagagacttgttgaatggttttgattaaaacgctgatagtgatatggacaataaagtccaagctgaggtggtctcagacagagatgaggaacttcttgggaactggaacaaaggtgactcttgttatactctagaaaagagattggtggtattttgcccctgccctagagatctgcagaactttgaacttgagggaaatgatttagggcaactggtggaaaaaaaattctaagcagcaaagtgttcaagatgtgacttgggtactgttaaaaacactcagttttatgtatttacaaaggtatggtttggaattggaacttatgtttaaaagggaagcagagcataaaagtttggaaaatttgcagcctgatgatgcaatagaaaagaaaaatccattttctgaggagaaattcaagccagctgcagaaatgtgcataaacaatgaagagcaaaatgttaatccccaagacaatggcaaaaatgtctccagggcatgtcagagaccttcctggaagccccttccatcacaggactggaggcctaggaggaaaaaatgtttcctgggccaggcccagggctcccctgctgtgtgcggcctagagacttggtgccctgcatcccagccactccagccatggctaaagagggccaaggtacagctggggccatggcttcagagggtgcaagccccaaaccttggcagcttccatgtggtgttgagcctgcaggtgcacagaagtcaaggattgaggtttgggaaccttcgcctagatttcagaggatgtatgaaaatgcttggatgtccaggtgaaagtttgctgcagaagcagagccctcatggagaacctctgctagggaagtgttgaagggaaatgtggggttggaaccccgacacagagtccctactggggcactgcctaatggagctgtgagaagaagaccacaatcctccagaccccagaatggtagatccactaacagcttgcaccatgcacctagaaaagctgcagacactcaacgccagcctatgaaagcagccaggagtggggctgtaccctgcaaagccacaggggtggagcccaaggctatgggagttcagctcttgcatcagtgtgacctggatgtgagacatggatacaaaggagatcatttcagagcattaagatttggctgccctgctggattttgggcttgcatggggcctgtagcccctttgttttggccagtttctcccatttggaatgggtgtatttacccagtgcctgtacacccattatatctaggaagtaactaagcttgcttttgattttacaggcttataggtggaagggacttgccttgtctcagatgaaactttggacttggacttttgggttaatgctggaatgagttaagactttggggaactgttggaaggcatgattagttttgaaatgtgaggacatgagatttgggaggggtcgggtggaatgacatggtttggctcttcttcacccaaatatcaccttgaattttaataatccccacgtgttgggggaaggacccagtgggaggtaactgaatcatgggggtggattcttcccatgctgttctcatgatagtgaataagtctcacaagatctgatggttttagaaaggggagttcctctacacatgccctcttgcctgccgccatgtaagacatgccttttgccttctgccatgatttcaaggcctccccagctatgtggaactgtaagtcaattaaacctcatttttaaaaaaattacccagtctcaggtatgtctttatcagcagccaagaccagctcggtcgcggagatcctaacccagcagtgctagaggaattaaagacacacatagaaatatagaggtgtgaagtgggaaatcagggttctcacaggcttcagagctgagagccccaaacagagatttacccacatatttaataacagcaaaccagtcattagcattgtttctatagatattaaattaactaaaagtatcccttatgggaaaccaagggatgggccgaattaaaggaataggttgggctagttaactgcaacaggaacacgcccttaagatgcagattgctcatgctattgtttgtggcttaagaacgcctttaagcggttttccaccctgggtgggacaggtattccttgccctcattcctgtaaacccataaccttccagcttgggcattagggccattatgaacatgttacagtgctgcagagattttgtttatgaccagttttggggccagtttatggccagattttggggggcttgctcccaacagactaatacacccattttctggtatgtgactctaaagtccttagaatcttcaaagtgatgtctttttcaagctaataattgactgatgactggcagcccctaggcaacttcagaatgaggctggtcactgacccaggtaggattagagggttgggactttcagcctcacccctaatccctggggagggacctggagtttgaattaatcaccaatgaccaatgaatcaattaatggccaatgattgaatcaattaatggccaatgattaaatcaatcatatctatgtcatgaaccccaaaaggactgggtttgaagagctgaacccatggaagtttctggagtgtggtgcatctggggagggcatggaagctccacaccccttcccacatgccatgctctgtgcatctcttcatctgcatcctttgtaaagtcctttattacaaaccggtaagcctaagtatgtgtttccctgagtcctgagagctgtttgagcaaactaatccaacccaaacagggagtcatggaaacctcaatgtgaagccagtcataagaagctctggaggcccagacttgtgactggtgggaaggtggtggcaattttgtgggactgagccctctgctgatatgtccaggtagatagtgtcaggatggaattggaggacacctagctgatgtacggtgcagaactgattggctgctgggtgtgtgggagaaacccccccgcatcacatttggtcacagaagtgtgtctgtgttgatgattgttattgtggagtgagagcagaggaaaaacacagtttgagtttttccaaacagggtggaatcccatctgccaatttagaatctgaaacttatagtttcagtacttcaattaagattgaagtacttcaattcagtacttcaattaagattcagtacttcaattaagattcagtacttcaattaagattacagaactggtaagtgaaagtgatacaacaaaaatgtaaccaaagtctgctcaacttaacagctaataacaacaaagttcataaaaataataccagtcgatattgatagcactgattgagccctggctctgtgcatgaccttgttaagggctttaatcgcattaatctctgaataaatatcctcacaaccaccctgagatccaggtgtttgtaacaattctacagatgaggaaactgaggcccaggaggttgagtgtcttgcccaaggtcaaatacctggtacctattgtaaccaggatgataactggatgagtctaatccctgagttcttacccacattgctccccaggctctgaaggaatctcatccttctcattccgtgtatcattttacaccccccctccctcctaggaaaatatacaaggaaaggagtgagaggggccgagggtcactcacattttacagtcagcttgagggggtcgctcctgttggagctgactgggttggagacctcacactgatactccccagcgtcctcctgcctgatggggtctatggtgagcatatggttaaaccaggacagcttcatcctcttcgtgacctgcagacgctggttgttgaaaatccactggaaagaggttccagtgttatttgtgtggcaggtcaggaccacggagcccttctctgtgactgtggtgctgctggcttggatggagggctgagccactgactctgtggatagagtgaccaacagaaagtgtcttggggccatgctgcatcctcagagatctcagagtcaaatttagaacattctcctgtgaataaaggagaaagatgaaggacagggaggagcagagagaaccagagacacccatagcagcgagcagtagggactacagtgacctcagagaccccagggaccaggaggacccagctgcctcagaccaggaccagggagccctgaaaaccctcccacagatgagcggccccagagtcacatgagatgcaatacctggggtggctttaggagcaggcagtcagagaaatggaacatgggtctcagcccctaagggacaaggaagaggtgtggccagctcctcctaggatcctacatccaggacccagtctgtaaagaggttatgattattcctttcttttttcattaattccctccctccttcatcagagaactactgagtgtgtgtctcagttgggccttgtgcaggtacagggtgtagtgggaagagaaagctgagtcctttccttcatcctcccatgggagtgacatcaacaaatcaagaaattcatgatttcacgtccagtgagggaagaaatgtggatctgatgggagaggcttggacaatcctggcattgagtctgatagttgagacaggtgatttcgttctaagtaaaaactgactaattctccatttgcccgtcattcctcagaccagaatctccctctctgagctgaggatgcccaagaagaaaggagctgaaccaacatctggtcctggggtccacagatgccccacggtggtggccacgaccagattctgggctgcagacacacggtggtgtgacgttgagcactgacagcctgtgtgatgctgatgcaatttctctttaataaaatggggtaaatgtcaatggtccctggcttgccatcctctctgtaaattaacattaaaatatttacaattacctgacctaaagcttggcacagaatagctccaaataaacatcatctattattattttactccaaaaaaaaaaaaaaaagagttctctgggcctgattcctggtggagaaggagcggtccagagtgtcttttctctgctttccctcctcctgaggacagtgcacttcccgggacatcttttaagtttcccatccagtttaatggcctgggaagtttgtttgtctgtcctctccactctgactctcaggtgaaagatgaggctctgcccttgcccagatggggctctgggggctgagccctgcctggtgaccagctctaggaaccacggccctgggacagctggtaaatcgttgctcacaatcagccctgcccaggaagccacaacccagccctggcacaggctccccagggtcatctggagtcaggatcttgggacaggggcctggggcaggggcttgaagggctgagcttctctcagaggatcctcaggccaggccctgactgagtcctataagatctttctcaggtcatgtctatgaggaggaggccaagcggggttggactgagactgattttcccccgctgcatctcccgcatcagactatccttcttgctgtagggaatttccacggagtccggataagggaaaggaattctgatctgttatagtttgtctcccctgggtgtgtcctgcactaaatgcccaaaccccaacatgggacgtaatgcagagggggatgcaggcacagcccaggcctgacaatcctgcgtatgtgaagcagaactgacccccaacacccagaggcacggaggaatcactcaccgtatacacggagatggtgagatgcctgttcaatctgagaatttctgtatgtgacttgtagggtgtagtatcccgtgtcctctagggtgacgttctggaaatgcagatctccactgggtgatattgtctctcgaccgctgtatgcaggccctggagtcctaacgtgagtgtctattacatatgctgcgattagctggttgggctccaccgttttccctttgtaccagccatagctgtaaagattctcgggcagataaaccacagagagatgaacattctccccttcagcaacttcaaagggcgctgatgcaataaagagccaggcagtggtgggtgcgttccagaaagttaaaagtgaggctaggaaagggagagaatatcagtcaatatttgacctatgcattggcatggaaagacggggtcctgggtgcaggtctcttcacccctcagccttagagggtgtgtgtgtgtgtgtgtgtcctactgggtcaaagtcagcagcatgaccctcattccttcagtacctctgaccttggcatttccttgtgtgaaccctctttcccaggggtctgcatggttccctccccactgccttcagttcctactcacacaagggaatccctgggagacttctttcgtgaagcctcctctagagaccctgggtcttccctttctgacctttcccagctctgttccctccagggctcttgtcagcacctgacctcacattctagatctctttgggtgtctgtcttcccccccatgagattgtgagctctgtgagggcatggacttgagtgatgttagttgcaccccagtgcctgggacaggctgcagactcctgtggatgagttcatgagcgttcccagggccttccatatcctggggtttatttgctaatgtctgaggttggcagatgaagacagagtttcatgccctggtggtgtttttatttaaattgtcactgtgatatagttttactatcattttcaaaatgtagtggccactgacaatgaacttgaaaacatggaccaactgagattgttttgccccttggcaattccagttcacttagattttttggttctccttagacgctctctcccctgagtctctaacaaaagccctctgtctcctctcagagccccatcctccccaggagaccccagccagtctctgtgctccctcctcccacccactcccagggagtcctcccctcacctgtgagcaagagcccctgccaggggatgcattctctgtggggacaagctgaggggggccccatggtctctgctgcctgctctgtcctcctctgtggagaggagcttgggctccaggaacgctctagacagggttactgtgactgttgtctctgctgtccttccttcctctatgctgagcttcctctcaggcaggagcacttcccgtttatgggcaagggcggggctctgcctacaatgtctctctgtcccctcccctctcagtcctgcctcccttgtccctcctttctccttcctttttgcctatatttggttccctaggcaaaactttgagaagcaacgctgatggggtcctcataacaggacgacccactctccccagtactgacctctgctgtgttctggccttggttctgtcacagccggtagattatttccctttgtgacacacaaaaccagctgggccctgggtctcctcatgctctccagtgctccaggaaggcagaatgatgcccagcaggaaagtgacagaggtggctctgggggctagaaaggggctcactgggtgatggctgggaaggacccacccgctatcttcagtgtcaccagcctggcctctgacccagggacagagacccaggcctggaggtctcgggaggatccccagctcctaggtgtggagggaggtgtcctgtgtgtcctgggaagagaggactttgatggaaggaggtgggaggctctgggttctgctgtccttggtgaaggtttcagggggaccctctccatgtctggggtctgtgcccccagcttaactctcattctctttgcaaatacatatattttgtggatctgcagttgcctgaactgtctcatgtccctaaatctttgtatccctttttacagaaggtcaggaagggtgtgtacatgagtatgaggactatctgatcagggcgagtgtttgtttcccaaagatctctttagatatggtataatacataagataaatgtactgaattagcaattttaagtgtagaattaaatgatactaattctattcacaatgttgtacaaccatcaccataattttttaccagaaaatcttcattataccaaatggaaacttcatacttttaatcaataactccccacttccccctgccccacccactggtagcctctgatactatcaatctctgtgaatttgcctagtttacatgtctcatataataaggaattatatacgtgtattatttttttctggattatttctcttagggtaacacttttaagattcatccacgtcgtagcatatattacagcttctttcctatttatggctgagtaatatcccaatatatgtttatacctcaattttaattcattcatctcttaatggacatgtgggtggtttccacatttttgctattgtgaaaaccgctgcaatgaacttacacttggaagtatctgtttgggtttctgtgttcatttctttgggggtacatataggagtataaatatggggtcatgtggtagttctatgtttaagtttttgagaaacagccaaactgttttccagtttgctgtgctattttatattcccatcagcaatatacgagggttccattttctctacattcttgtaaacacttactatttaatattttttaaaacttatagccattctagtaggtgtgaagtgatagctcattgcagttttgattttcatttccctggtggctgatgaagttgagcattttttcatgtatttactgacaattttaatattttttagagaactatttattcaaatcatttgctgtttaaaaaaaatgggttatctttttattattcagttgtaatagttctttatatattttagatacaagtcccttatggggtacatgatttgcaaaatttttctcatattctgtgtcttctcactttcttcatggtgttctttgaagcacaaacatttttaactttgatgaagttcacttatctatttttaattttgttacttatgctcttgatgtcatattgaagaaaccattgcccaatccaagatcattaagttttactcctatatgttcttctaatggtttgataagttttgctattccatttaggtttttgaaacattttgagttaacttttgtatgggctgtgaggtaggggtctaactacactatctcgcatgtggttatccagttgttccagcacaatatgaagaggctaccattctttccccattgaggaatcttggcacccatgtcaaaaaccaatgggctgtaatggtgagggtttatttctggactcttgattctattccattgatctctatgtgcattcttgtgccagaagcacactgttttaatgattgtagtgttttagtaagttttcaaattaggaagtgagtcctccaatttttttttccagattgttttggccattctggggtgacttttaaaaaagatgtagttcaatggttctcaaagcaggagtggttcagctctccttttttggcagtctggagacctttttaggaccttaatctaagtagataaattattcccactttcttttctgagttgctatgttacagtgtatattgacacccatgaaataattgagagaccctggaagtgcttgcctacatagtgagggacaattagttccatgatcatgggcacagaagattttgttttgggaaacaattttgttggtggagttatattcatgcttactcttttatttgtcttcatagcctgcatctccttcagacttcatatctgtttattttcttgtttgtcctctggggtttgggtgttgggtgaccagtcagctggagctggaggaggtgcttagcaaggcagtgaccctggttgggaggagcagggctcagcagggtgaaagtagctgggccttgagtcaggagtggcatctggaaggcctgactgtaagggtcagaagggccagcaggtgggtgtcctaggcacaaacggtggctgctgctgtggactggaggaaggtaagaggccccgagtattccatgttcttactggctccccaactgaggattcctctcctgggctggtgctgtcctgcagcagggaggggttagacagggacggctgcacatcaggccggagtccatgtcatcctcttaggcactgtcactacagattgaggattctgttcataagccaagcctttgcacaaggaagggacccgggctctcaaggaagagcagctcctggtcagacctccatctccttctctctcattgcctgaggcctcaagcttggtctacctggcacaggggtctggatcctcctcccagggttggggtcttactgagctgggcacctgcaggtgggagaagatctggaggggccccatctgccttcaccagattgatgttgagggtccctgagtcctgcaccactatcaggtgctgagcaacttccagtgtcagtgacaaccaccccatggtggaagcagaaccacctcgtgagaaagcacctccaagcctcagtgcttgccatgtgtgggaatttgctggtttcagttgggggcatgttggtgggtggtcatgaattcagggccggattctatgctcacagtgcacatgctggatgtggtacagaccccaggcagggctcagtggggtggttttgggtgtgcacaggtatcttttctggaggagctggtggtgatttggctcccagaagttcctgagctctgcagactcaccaagcactcaatatttgagtgaacattgggcgagagagcagaaggtaagtgtcagggcatcggggttggtgcctctgggaagaggaggaacattctgggaacaaagctctcccccggcttacagggagcttcccatcgctcctgccttgaggatcagggaaactagggcctctgctcttccaggggctgcttgcaggcagtttgctctgggagggggtgacccaggagttgcctctcattttgcatttgagatttaaaaggagaagggacagtatatcttgccaggtcacaaaaattacaggcatcatattgactgaagggcactcctgtcatcactgcaatataccagaatggtcttttaaaaaaataagtgatttaggtttaccagcaactgtaatgcttgttttattcttctagttcaccgttaatgtcacttttgtagttttagcactggcaatgttgattttatgttgactctgatgattttaagctttcatttgttcacatagagatcatcttctttctgaatattaatgcattttttctctatttctactggttattcctgtacatagagtagagaatcacttttcccaaggaggtggaaagcttctgactaccaaaaaaaaaaaaaagtgtcaaaatgctttaaagtcagtaacttaaagatcaaatccaagagtgggcaacagattctgcccagggtctgaaaggtggagaggtgactggtgaggatgtttaaaagacctctcctctctactccctaaatgggggccatccagtgttcttgaggttcagagaaggcccagggctggggcagcagggcactgtcagctcccagctcccaggggccaggagtaagaccccaacactgtccagacactgattgcattcattttgggggagagtagattcttatttaaagaataatacaaaagtctacaaatatgaacataaacagaaattcctttgctacaattttccccttaataagacattccttcctaatgacatatgtgactgcattcatggctgagatgttttctaggatggtgagagcatcagagtggactatctggtgccttggggtcatgcattttcttcttccaatgtctacaggatcccccatgtcccactttgtagtgtaactcagtgtgtgtcattctggtttttgttgtatagatccttggaaagcccatgtcattcctgctgtgaggtacaggcagccaaatggcatcatctctaaacatgccttctcctggtacatcaaattatggaataaatgaaagccattttgacagatattgaagatataagtttctactcttcccacacatgcttctcccaagtgaaggattttactggtgaattgttattagagattagtgtggatcagtgactctgccaggggaaattttgccctctaggggacatttggcaaagtctggaaacattgttggttgtcagagctgggggagggagtcctgctggcattgagtgggtggatggtgctgaacaccctgcagttcacagagccccaccagtttgaccacccaaatgtcaatgctgaggagtggagagccctgctgtgccctcccgcagcttccctgaagcttcccctcacctgctcctcccatgtctccccaccacttccccacttcacccgcctccttacacctcagtcccctccacctgaactcaccccttagtccaaggccagccctgatctccgctctcctggtctccttgctccttagcaggaggcgcccactagatggcgcccttgcccttactggagctcaccgtctccctttccaccctgagacaaatgtggctgcttttactgccacaaccccagccctccacactctagatttgctcagggagcagctcctggacagacctcagggaccccagggaggagcctcactctggagattttgatggcatggtctttgaacttcactgttacccccagtcaggatccaggatgttgggagtgcatgattctgcccggtcccacttcagcaggaccccactgctgagttgtctgtggggacccgggcctctcatctccttcttgcattgcaggagagggatcttagcactgctttcacataaagtcagataatggaggagtgcaggtgagtttgggaaggtggacatgaagagaggttgtgtccctagaggtggcagcagtgagaggatgggcaggtgggaggaacacagcccatccagggttgccagccatattaggagcgacagcctttcctctaagcctccagcctttttcctgaaacattccagaactttccacttcagcacttcccactgaggctcctcaggtctgtccctgagctcccagctgagcctacctacccatctgaaatcctgagtcctgtgtcaccctcgttccccattattctgtgcagttctgtgggacgcccagctctcctgacacccccagtcttcagaatggccatcagcgctgtcgctgtggcaccagggtgactgccgcctggaggctgagtcctggcttcctgacagctgtggggcccgctctaggctcccttgtcctgatcattcatcacctccaggatgcacagcagctgggccagggggaggagcagggacaggtgtcagccaccctgtgtgtctgcaagtcaggctgggggtgtgggaggacgccaggaatgactgaactttctgatttagagggtgagagcttgcactgatggaatttgggatttaataggaaaagcatagcgttttcctattttgtaggcagggtggctggagtttggaatcatagattcccctgggatgtcactgtggacctcagtcccacccgttaggggcacagatttcagaatccacaccctggggcaaagcaggcatgggaggctccatcagcctggccagggctctctatttgtgcagctgctgcaaggagatgtgcactctgatgggaacagtgctccctcctccttggggggcagtatctagctccctgcagcccctctccctgcaggccctgccctctctgaacctcaccttccccaacccgccccccgcaatcccatctcagctgtaatcccaacactttctcatccattatgggtggactgcttgagcccaggggttcaagactatgctggctggacaatatagcgagttgttgtctctacaaaaagacaaaaattagctgtgcatggtggcatacacctgtagtcccagtcactcaggaggctgaggtgggaggattgcttgagctggggaggctgagttggcagtgagttgagattgtgccactgtatacttcagtgtaggtaacagagcgagaccctgtctcaaaaaataaaagtaaaaaaaaaaaaagaaatatggaatacattattgttaactctaatcaaccatgctatgcaatagtccaccagtaataccagtaatagccaataatgaattatctgaaaaagaatacaatttattcttagctatctactgctaaaatttttaagctatcttttatgatagctgaaacaaaagaagtaaatttaaccaaggaagtaaaagacctttataatgaaaactgtaaaacattgatgaaataaattgaaaaagacacacgcacaaatagaagatattccatgttcatgaattggaagaactgatattgctaaaatgtccttaccacccaaagtggtctacagattcaatgcaatttctgtcaaaacaccaatgatattcttcgaagaagtagaagatcctaaaattagaaaccacaaaaattcctaaaacctgcacaaaacaccctgagttgccaaagcaatcttaaacaaatagaacaaagctagtggcattacacttcctgacaatcaaagcatactgcaaagctatagtaaccaaatcagcatggtcctggcataaaaacaagcacatagatcaatgaaacagaataaaaatcccagaaataaacccatgcatctctagctaactgattttcagccaaggagccacatgcacacaatggggaaaggacagcctcttcaataagtggtgctggggaattggatattcatatgcagaagaatgaacctagaccctatccctcaccatgcacaaaaaattaactcaaaatgtattaaataaagacttaaatgtaagaactgaaactatgaaactactagaagaaaatatagggggaaaatccatgacattggtctaggcaaagagtttttggataaaatctcaacagcataagcaacaaaaccaaatataaacaaacgggatttcatcaaactaaaaagcttttatacagcaaagaaaaaaaaggccagcagagcaaagagacaacctacaaatgggaggagaatatatttgtaaatatatacatatatatttgtaaatatatacatctgataagaagataatatccaaaatatataagaaaattatgtttctgtatagttttatctgactgggatacagaggccacatccacagtcccatcctcaaaggccacttgttcccaaaatgtcaagcacatccctcaatgatccatcatcaacacctatgtctgtaggatgaagggtgaatcatgaagcactaaaaaggaagaaggaagccaatcccaaaacaaaatgatgcagggtctggaaagtccaaagcattttttttttttttttactgcatcttcctcctttcttctccacattcccaatcctcactattgattaacaaaacaaaaaaaactgggacccaccatcttccctactgtcaggagatctagcgagattgtttgagtcttagaccaaactttgccataagccaaatttctggctgactttacaatgatatgagctagcacagtctctttttctgccagtcaacttgtgctcggttttatttgcaaccaaatagaggtggtaaccaaatataggtgaccctaaaattagtcatcaggatgaaatcctaaaatgtgcaacaaactgggttgaattcaggattagtagcaacatctctgttgtgggcttgaaaagggggcacccttttatgcagtagcaaaattgctaaattgttgtttgctgagtctttggactctcatcccggattttctatgaccattcaaacagggctgcaatgaacatctatggttgtttagcttggcacacttctacatttctatatagtaatatctagaagtgcatttgctcaatcacaagatatgcacattttataattgactgctatcgaactaccttaaatagccttaatttgttctcaacattgtttaacagggtctgtttaatgtcctacgtccagcaaggacagtatcacttttcttaatatttttcaaattattggaccttaacaaatacttaatgtgcaattaattgattcctttgtattcccatgccttcttttatatgtttccttatagtacacaaaaccacattattgtttctttacttgtgtcattccaccctggaccattcctatctaaactataacattatgagagagagagagagagaaaacaatatgaaaatataaattgattaatcaaaaaaatttaaataggacaaatcaggaagacacaagagagattttaaaattattcagagaataccacaatagctgtaccaatatattttaaaacttagatgaaacggacaactatctcgataaatgtaaattaccaaaactgactcatgaaaaaatggatattatgaatagagcaataatcagtaaagcaattaaaaagacagttgataatttttatttactgacaacaataacaaaatttcaggtcctgatatttttatggtgaattttaacaaattttcaagctcctcctcaaccaattctcagaaggtttaaaactttaacaagaaaacactttctaacacattttcagaagctgttatagcatgataccaaaaccacacaagaaaattatagaccaatctcacttacaaatatacatgcaaaatcaaacaaaatcttagtgaaccaaattcagaattaataatagcaaacaagcaaaatatgttatcatacgtatggcttatatcaggaatgcaagtatgtttcaacatcagaaaatacttctccacattaacagactaaaggagaaaaacgcttgtttaattatctcaataggtttttagagaattttgaaaattttataaagttatgcgtattctgtaaaattgatgaaatccaaccttgatttatttttaaaaattgcctttcctatagaattataggtaaaggaaacacatgcatcctcacagagctacttcaaggctaagttacttcccataagtaacgtatcctgtaatgtgtgcttggcacatattcaatactaaacaaatatttgcaaatcctcaaaccacttctcgctcaaataacccacctttgtcttttgcctttatgttagggttgattttctcaattgtatcttggagatcctttggtgggtctttcagcaattaccctgaatttgcttttctgtttacaattttaattcctgggaactctttcttgttctctgactgcacccttttcatgagagttcagccatcaatcctccagaaccccaccccccccgcccccccaaaaagcaataaagatgtctaaaagcttccttctgggctttcgaatgatgtttaccccaggcatttgttctattcgttcatcacccattttccctacaacttgcctacacttgatatcagatttttatttattagtcacctatcttcttcattggcccattttcctattttgccactggttgttctcaaatgtgttatgattcctggttgtacagtcaagtggttgataatcttggatatacgataaagatttgctctgtagctgtgtgtaagcctatataaaagcttttgtatttttcttcttaaaaaagacaaaagatggttgggaagatccctccagttcaccagttcgaggctgcagtgagctatgatagcgccgctgctctagcctgtctgtctgtgaaaaacaaggggggcggggggcgggggggaagactggagatgtaaatctcccgcagggccctacccgtatccgcaacaggtctctaacaggaacagcctcaggcctgtgttggaacaaggtaggttacagaaatctggaagccagatctgtaacttcagggtaaggactggctctcagggctgatcccccgggctgggtgtcccagaggcacccgcccccgccccttccccaaggcaggccaggacaccttcactcctctccttaggctccccacccccttctcctccccactgtgcctcctggagtagcggtggcggtgccacaggggagcggggcggggcgggctctgagggcaagggggatgggccccgccggggtcactggcggccaccctggaaactcgacgcaggccggcccttctagtgaatcgtcccagccacagctggcctcccagccgcgcttggggcgcctcggggcgcgaatggtgcaggttggggagactcaccacgcaccgtcgggggtcggtccggttattcctcaccgctcggctccagtgggcgcgcgggcctctcctcctcagttcctgcgctgcagtccctccctcacccttcgcagcttgggaatccaactgtgtcattccgacggagcgccgtgaggacctccgagggtgttagcgccaagtgatctctgtccagcgctctgaatatccaagtaaaggagttcaatgaagggcgggtcaacggaggagaaaccgtgactctctcaagggagcccaaggcctccttgtctaattagtgacgcgccaatggatggaggctcttcccaccatctcttcccagcatccagtgacaccaccgccaagggacgggctcggcggaacctgcaggaaagaagcatcggctgagcctgactgcagcgctgtgaagagacaggggaggggatcagtagttggtcccgcgcccaccccctgtttccgcgaggggcggagttgactggccatgcaggcagagggcgaaatgtgaaattccactactcctaccgtttttccctgacccgatggggcggagtgtcgtcaggctaagttccctggcggtaaggtggggagattgaggcgcacacctgccgaacggtaacgcaggattagctaaggcgagctcaggacagaagcctcccgaggagcaggagggcaaaataataaataaataaataaataataaataactcactccttggtctttatttgcggcaggaattcagaaggtgaaagcggggccttaggatctttctgaccttttgggttttaagcaggaggtgtcagaaatgttaccacagggctagctggcttgtggccagcaagcgttcacaatgccctcgatttttcatccctctctgtgggttctttttttcattgtaaggcagaatttctacgattgctcacccactcagagaacctgagctggtttagaccaggtgagacaggctaggtttaccctggtgatgatgtgttgttgccatggcgatcctgcccagtaccagaggccctgcagattcagatgcttggtgcctgtgcttggctgaggggccaatgggtgaagctgccatctgcgggatgatgactgaagcctctaagtcagaatccgcccaggctgagccttagggcagctccatggagcctcggctggcctgggatagagagtccaccactgtgccagcccccagccactgcctaggtcctgtgctgagagccccttgtccagggaaatggcgtccagtggaaaagggaccacccccttgcccttcactcaaggcaggttggtgacaaccctgaagctaatccgttcctagaggagctgcttctgggtccgagttttctctgcagcagagcagctccctggatgggatctgttcaaagtccgcctttcacgcggaattttccgtccttgcaattttccacctccaccactaggggatcctctctgaccgcctcatgccggctctggcctctgagcaggggtttctcttctgcatgtgcgaccttgcgcatgcctagtggccttttgggacctagagctgctccacaccccgatggggttacagagtgcctcgcctccactccaccccaccagggttccttccctggctgggatgggatttcagaagcgccgaggaacagcccagacaggtgtgggagagtagccaaggcccctgtcccggggtggccaggacagcggtggcctcgcataggacctggctgggctgctgcaatcagtgtcctgccccttggagagcaacagtgaaaacaacaagactatcttcacccaccttaagaaagaacagaaccagtatccccaactctgctgtgtatcccaacccaattccattccccaccccactctcagtagccaatatgcaaaatattagaatactcttactgttattattttcaaccacactctgcatcctgaaaaaccatatatttcgttatgtgcttttaaacttcttgaaaatgaaatactgaggctgggcgcagtggctgacacctgtaatcccagcacttcgggaggcggaggcaggcggatcacgaggtcaggagatcgagaccatcctggctaacacagtgaaaccccatctctactaaaaatacaaaaaattagccgggcgtggtggcgggcgcctgtagtcccagctacttgggaggctgaggcaggagaacggcgtgaacccgggaggtggagcttgcactgagccgagatcgcgccactgcactccagcctgggcgacagcgccagactctgtctccaaaaaaaaaaagaaaaaagaaatactgaattttcaaatacttgctttttttttcggtcaaaattatgttctcaaatttcactcctgtagatgtgcgtggctggctgtagtttttgcatttttattattaggtattctcctgttgcattaatatgccacattttatttctctcatgtttttggtgaccacttggggtgttttttggttttgtatttttgctgtatacatgctgccatggtggacatacctctttatacatatttcctgttgtatgcagacacaattttaggatgtgacatcttcagcttttctattgtgtcgtgtgtcttttccttcgtgctttgtgttatttacatattctggacacagattctttgtcaactgtatgtgctgcacatctctttcccagtttgtgtcttcttcttcttttttttttcttaaaaaaaactttctttatagtgttttttttttctttctttctttgttttgttttgtttttttgagatggagtcttgctctgtcacctaggctgaagtgcactggccgatctcggctcactgcaacctccgtctcctgggttcaagtgattctcctgcctcagcttcccaagtagctgggattacaggtgcctgtcaccacacccagctaatttttgtatttttagtacagatggggtttcaccatgtttgtcaggctggtctcgaactcctgacctcaggtgatccaccctctttggcctcccaaagtgttgggattacaggcgtgagccacagcacctggcctgtgttctttcttaagtagatgttacttttaatataatagaatgtatcatattttgcttttatattagtactttttctatctaattcaaacacatccccaagggtctttgtgtgtagactgaccaatttctcaagaatcatgaatgaatactgcttctctttccccaatttatctgtaatgctacctttattataaagtttctatgcatgtgtagaaatagttcctgatttttcactctgtgccaccagcataccaatagcacgctgtcttaaatattaaatagcagagctttatgagacaacttgatgtgcagtaggcaattgcccccttgttactcttcttcagggttctttgttgtaccacatgaattttagaattggcttgtccagctaaaagacaactgcaaggattttatttggaagttcataattctatacataatttggggaaagtattttcataataccaagtcttcctattaatgaacacagactctctctctctctcccccacccccacctgtttagttatttatatctttatggtctgttagttattgtttattgtctttcaaccaggtttcatgtttttctacatagaggccttgcatgtgaaagtctttcttcctagcttgctattacaaattttttttaattgcactttttgggtacagtggcttgtactgtaatccccgatacctgggaggctgaggcagatggattgcttgagtccagaagttcaagaccagcctgggcaacataatgaggtccctgtctcaaaaagtttgttttaaaaattgcatttgctgttattcaacaaatgtcattgtgtctcatatatggatttttatatctgataaccttgttcaacaatcttttgattctaacaatatatcagattcttttgagttttccatatagacaataatgtcatctgtaaattataattgtttcttctttgttatttcttggaccttttattttatatttttgtcttgctgcaaggcaatatccctctatatattgtggggtcttttttctcataaagtggggatggtgaacacccttgtcttgctctctgattgtataaagcatgctttctgtagcattttgtagacgctcttttttagattgaggtaattcacttttatttctggtttactgagtttttagcataaattcaggctgaatttgagctaaagctttttctggagacatcatttgaaaaattcatatgatttactttctttaagtcaccaaagttatgatttacattgaactgagtttctactgtttaactgtattcttgggagaaaacccacttgtcactgaacaatatctgttttatttactgctgtcttgtgtctaaattttcttttaggattttttgtatatgctcagattagcctgttattctcctttctgtatttttttctggtttgggggtcaaagttataatagcctcacaataagagctaagaaaccagccctaatggaggccggggcaggaggtttggagttcaagaccagtctgggcaaaatagtgagacccccatctctatgaaaaatagaaattagccaggcatggcagtgagtacctgtagtcctaggtacttgggagggtgaggcaggaggattgcttgagcctaggaatttgaggctgcagcgaactatgattgtgccactgtactccagcctggatgacagagcgagaccctgtctcaaaagaaaaaaaaagaagaaataaaaaggaaaagataaaagagctaagcatctgtttccttttttccattttctgggagagtatgtgtaagactgtaattaactgtttcttgaataatgggagaactctgtaaaataatctggctttggtgttacctgtattggaaggatgaaaaataccaattcagtttcattattggttgatagggctactcatgctttttgttttgttttgttttgttttgtttttgagaggaagtctctctgtattgccctgttgtccaggctgagatgcaacgttgttcacaggcctgatcctggctcactacagcttctaacttccgatctcaatagatcctcccgcctcagccttcccagtagctaggactacaagcatgcagcatcacatccagcctcttttcctgcctgacccagttctggtttcctttagttttctaggtgttcatccattttatctaatgtttaatgcatttggcataagggtgctcagtgtcctttcattgtctgttgtctgtaactgttgccattttcattcctatttatgagtactggcgtcttctctcactttttcttaataatcctgctggaactttgctttttaaagaacatcttttgacttgttgattcttttttcatacatattaactattttcttattttttgcctttatatttatttcttttcctgtttgaaacattgctcttttcttactataaaaatgggtaagtagctcatgaattaccacctcttttaaaaatcttttctactgtaagcattttagcagtttacatttgcccacaagtaccacttcagctacaccctatgtgcttttacataaagtcttcatttttggtaagacatattctcaaattttaattatcacttgtttttaaatccatgatgttttatttgaaatgttgtttctaaagatacattttctggttatacttttattcttctaatttagcacagtggccacaaaacatggtctgtgcagtgcatacaatcgatgagtaatttctgagctgtagtatttggcataatatatggcaaaatttcctaagttttccatgtgtgctttaaaaaacttccagtaaaatacataaatctgttagatcaagcttctcacattgttcaaatagtctatatgtttactgattcatttgactgcttgatttatcaattacaggtaggaatgtattcaaatctcctattaaagtgtgacactcaagtggctttttaaagacagagatgccaaaccaatgaatacatgattttccccaaagcctgcacaaattctctaatgaaattttaccatgaaagtttgtttaattaaggcttactaaagcagtatgttgtcttttactttttaaacagagaatatatattttaatacatcgtttaagtttatgattaattatctattactgaggataagaatctttgcctgtgctcattcagcatttgcacttcatttatgatctgccttctcatagcttctgttaatttttatactagagacatttatttgtttgtataaatgttgaaggtttttttttgttgttgttgtttttgagtcagagcctcgctctgtcacccaggctggagtgcagtggcatgatctcggctcactgcagcctccatctcctgggttaaagtgattctcctgcctcagcctccagagtagctgggactacaggcatgtgccaccaagcaaggctaatattttgtatttttagtagagatggggtttcgtcctgttagccagggtggtctcgatctcctgacctcatgatctacctgcctcggcctcccaaagtgctaggattacaggtgtgagccaccgtgcccagctgggttttttatattataaggagatgtaatagatagatagatgtttcaaagatagtcaaatgtttttaaaatttaaaacacttttttacaggttgactttcaccatttaatttcatctatgtgttttgccttagagaaattttaaatgctatgtagatctcatgacttataattatgaagcattttgttttctgttttccacgaaacttagcttaactttgagcatataatagttgtaaaggtaggagagtaacactgaaaaaaggaattgcataaaaatggcacattttctgtagagttgtttatcgcctgaaaataggccccatttcatggaagtaagatgatcaggctcaggtccccagacgaaactcttggcatggtttttggagatagtccagggctcagtactggctctatcatttgctacttctcccaaagtaaccaatatctcatccaccctgagcccatttccatatctctaacatgaggataatagcatctaccttacacaccaagtagagggatcaaatgtaggaactaaatcaaagtaccagcactgaataacctacatcctcccacttcccaaaaggaagagagatgtatcccctgttgacaaacgagaccattttgcaggagagaaaggaaatgccagttcacttgcaatgtaaacatgctctctctttttagggatgtccagggacctgagagagaacccatgcttaccaaagagtttctagttccagacacacaggactcgaagggtgacaagtatggttttcagggtccctgaatccacccagtcctcacagaaactcctaaaagctgtcgattgacagcgttgagttcacagctctggtcctcacatgctgatactgcttgtgatatcgaacccgacaggaccccacatcacaattgatttaccaactacaatataatacctcctgaatctccaaattggctcacccaggaacaaaggcttggggtaaaactggattaggagatataagctctgaattttctgagggtgagacacacaaggattctaagtgacacgccacagagtaacgggtctgtgactggaggacccacagatttgtcttactggagacaccacatgcacacaaactccatccttagctgtggaaacaagggtcttttgctatcttagccgaattctgggagtaatttttggaggggaggagatctttgggattgcctctttcaggccctttacaaaaatacctacttcttaaatggtaaagcttacactaaactgaaaaaattacatccttggctttttatgaagtaggtgttggattgaatcactactggaagaagtatggcatcgcaaattctaagcagtggtcaaaggatggatctgttaaattagaaaaatctctaaatttataaaaagattttagattcctttattctaaacaattgacctatttgtactcatgggacaatcaaatttcaaaggagatatgtaacgatttcatggcttgcattaaaaatccttctgataaaattaaagataaaaaatctgaccccctgccaaaaaaatcttttgaagttcatactgcctgctttcaatattctgtgggattcacaatgaaaggtgccttatattgtggcctagcttcaagtttatgccttcgccaccatggcctgggttcaattcccagtcagggccccagcgcctttggtttaatgtttgcgtggcatttgacttttttacctatttagtattggtgagattacctttggtaaaaaaaagtttaaagagtggaaatcgcaattctttgtgttggctaaaatctgattataagagatctggaaggttttatttttctttttcaaagagctctatggtcagaagtcggcttcatgaaaagctaatatttaattatatgtacatacagtctttctggattttctcttttgcctcctgttttgaaaaatatttggatttgagtgaaactccgttttagaaattaattgcttggtacaatatacccatgtaactaccctgcacatgtaccccctgaatctataataagagttgaaattttgacaaaataaaattagattttgaattaaaacaaataggtgcttggttcctctgctcacttctttttaaaaggaattcctctcccatgtacttcttcttttcccttctttaccttccttttggcatctttggtatcacatgaagggatctagagggaattttaagtgactctgaaattccttgagaaatacacaaaaagatcccactcaccccttttgggggtctcctgttctccttgtggagtccagagtcagggacaggctcctccaggtctgcagctctgctctcttttatttcatcttggctgattgctttggttttgtgagtaccaggcattactttgtactgtgagagacacgtcctttgtgagtgcaacggctgctgggtcactggtgagggctgcagtttggagatggctgagagccgttgcaataaatggttgtgattgcagggggctccttgtttctttgcaagtttagatgagaaaggtgcagtttggacacagtttaaaggctgtgaaaacaccaccaatgaatatgatttcctttggggatggtctgattaaaagtgggctgattgttgctgtgctactagccttgaagacatgtttctacagcattgtgcagtgtggaaaaattgtgtggcttggtcttgtggcatgtcccttcttttagagacctcagattcaatgtgaaattcgggatttttgattttcaaagatctagatgccctgccttccagatgtgcctactcttcacatattttaaaattagatcctataaactgcaaatactttgttggcttctgtgagatcagaggtccagttagaaaaggaagacagtttgttaaaattaaaaactatttatctaatctaactagattggcctccaaatatgactttctgacattcagctggttactctgaaaagatttctaaatctcttgaggctcatctatatgtttccttgcaaagaaaaaaaaaaaaaaaaaaaagcaagcccaagcactagtaagaaaaagatttgcaatgtttcatgaaaggagtagatgagtgaagcatttatttgtagatactgggttggatacctgtgcaaagaagaagaggtcaataataaaaattgccaggggatttcttggaacttaacaagctgaattaaatatagaaatgtcaggaaatcaaggcaggaaatactcacttgtggttaggcagacagggcagggttctgagcttgagatggagcaaacagttgtggtgggtgaagttcacatgctttagagctcagctgtcctagtaaagaagcctaagagtctctaaagctcttatgagaagatggattttttttgcctagattaaaaggttaaagaattgctttaagttggataaaataaagctaaatgtttaagcaagttgtgaaaggtttatgaaaaaattaattaaaatatttttgtgtgtaaacatattgactaaagttgaaggggtataattcagcatttctgtaaattgagcattgaaataaaaacacaatgggtttctcttagagcactaacctgctctttaacaaaaattgtaaagggttatagaaagtctataaaaatgttaccttatggtcaaacattaaaattgggtaaatatgtctatcaggttttattaagaattaggtttaacattaatagtacactaatgtaaaggtgaaatttggcttatttggtacaaaaatcatacaggaagcattgtgaaatataaaatgatttttagctttctttgggctatatttctataaatatgttattgatgagggttccaaagttatgggagactcctataattctgctatatctcagtgtacattatcagtcataattataattgtcatgttaaattattgtgggccacagaggtaacagatttccttgtcaattgtgtctttgactatgactaccctaaaacgttcagtcacccatatacacatgttaccttgttttggccctctttagaaggtaattttataatcagctataaagccctaacaggtgctcttaaatgcaaattttgataactttggagattgtgacatcagaagagaggaaaaatgttcgggacacttggagagctaaaatgttcattgatatcaagcaggacaggaattaactgcatgaagtgaactaataggaggctgaagtgatctttttgactttttgcttaaaacgttgctgatcctttgttttgcttttcagagtcaaggcaaattttcttttgagctattgacagcttttaacgattaatcaaaatatactcctatgaacaccatttggagcattatttgtttctctctacccgatttccccagaatttggaaactatttgtgggtattcttaatttatggcaatatagttatttgcataagtgcaataagaatgtgttttctttggtaacaggacacaatttgaaaaactggttattttaccaaggttttgaccagaatgctgtgctttcctttaaggaatcaaacttgacttgtggagctaataaagcctttggaaaactgaccttatatcctgtgaacacagtccctgtacagggttactgatctgtgggaagaaaagaatgtcacattctgacaggtcaggaatcccaagttatcttgaaacttcaagaggacaggaattcacccaaccatatgtatttgatggtagaaatccatggcaggggctcagctttaaaaagtcttatctcagattccttctataaaacaaagtcccattaaaaccaattttaaaagcctatgtgaaaaataattattcttgctgcacctcgtacaaataaagtggcaaagcataataaagcaaattggtcctgtcgtaatttgtctttagtaaaaacgggaaactggggtcgggtgcagtggctcactcctgtaatcccagcactttgggaggctgaggtgggcagatcatctgaggtcaggagttcaagaccagcctggccaacatggtgaaaccccatctctacaaaaatacaaaaatgagccgggcatgatggcgggtgcctgtaatcccagctactcaaggggctgaggcagggaagcggaggttacagtgagtcaagatcgtgccacttcacgacagcctgggtgacagagcaagactccatctcaacaacaacaacaaaaaagggtaactggagagagggaagttatgtttcaaaaacttttggaaactatagtacacctgtttttaaattctagtctggcattcagtttttattattttctacagtttgggttaaattcgtatttctctggctacaagtctcctaaataatcttttcatttgtttcctttttctttccctttttccccatttttcttaattggaaatcactgaaacctaagctgtgctttcttaaagccctgtgaactgaagactagacaaccgaaacttctgaaggaagtagcagcaacctatttatatgtgttgctgttgcctactattatgttttagcaggtgctgcctctacacccccgaaacagagagtgctactgggaacaaatcgactttttccactccagtgctgcattcggtgccccataacgatgaccccctctcagcaggaagtagccagaaagattacaatgctccatctccctatgattcttgtgataaataaatatacaagcatgatagaaatcatgcgcaaattgacagtggggattgtggcaggccagatttcactaatggaggtccccatcacaactacttcagtactgactgagtggttaagttcagtatcaaaagctgaaagtgccagcgcctttctacaaaggctagaatgtaacaaaagcccaccaagggttttacctaggcctttcctgggccttacagcatgacaaaacaaagaaggaattcttaaccagacctgtttaggattaaacaaatttaattgggggtctgaagaaactcgccaggcctccacaaacaagttcattgggggtctaaaggaaccccccccaaacctctgtgattgagcaggagacaaggtcagggtaattgccccagcacctggactcatttagatttaagtaaatgtactgaggctccagagaaaggtctccaagacttagactagagttacagattaaaagaagttaatcacttatatctttagataaatgcacactgacacgtagacatacatcttagaaaatatataagctctggaaaaccttgtaatttacagttggtctggagatattttctgggccttctctctgtaaccggttccagaaataaaaaactctcttcctccccagtttatctgcatctcgttattgggccgtgagaaatagcagccagaccctgagtttggtctgggaacacactggctgggcttcctgcctggcggtagagcttcactgtcctccttcccagccaaaatgtggcccttgaaggcttcctccccaactgaccggttttgggttctaggtactcagggaacaccgtcttcaaggaggccattttcatactgttcctggtttgatttttctgaaattaggaaatgccccttgaggcatccaggattgtctttatttcccctgaagcttcccctcctgaagaaaaaagttctcaaacaccctcaggactcaaaccccaagttcaccctgtgaaacattcccatttcctaaacccaggcaggctcatggccctcagcctctcagaccccatggaaacctcctcccccacttcacgggttctctccatattgagagcctcccctcctcggcacacaacccagagactcaccccaacatgtgtagcaaatcaccctggaaacaatcatggctgaacgtggtagcccatgcctgtaatcccagcactttgggaggcccaggaggtggatcacctgaggtcgggagttcgagaccagcgaggccaacatggtgaaacctcgactctactaaaaatacaaagttcactgggcattgtggtgtgtacctgtaatctcaactactcaggaggctgaggcaggagaatcacttaaacctgggagacagagattgcagagagccaagatcgcaccattacactccagcctgggcaagaagagtgaaactacatctaaaaaaaaaaaaaaaaaaaggaaaaggaaaagaaaaaaaaaatcatgaggcaacattgcatttaacaatattttatttatcaaaagacacttgtctttctcaggtaagtgaaggtctagagatgaaacgagtcccgatgtaaattgccccatgggcattgctgagatcacaagatcatcactgcagcatgcagcacaatagtaaatttctcaggatggaagttcaacaatccaaaaggtagtattttttttcatgatgctcagtccatcatacgaaataaaaataaattccttttcatgatcatccattcagtagaaaaaatgatagtaaatttgttctcatgaagatttttaccgtaacatataggatttatcgttattattattattctttgttttttgtttttttgaagcggagtctcactctgttacccagtctggagtgcagtcgtgcgatctgggcacactattaacctccacctccagggttcaagcatttctcctgcctcagcttcccgagtagctgggattacaggcatgcgccaccacacccggctaattttcgtatttttactagagatggggtttcaccgcattggtcgagctggatttgagctccggacctcgggtcatccgcccatctcagcctcccaaagtgctgggattacaggcgtgagccaccgcgcccggcctcaatttatcattattcacgcatccacaaactgggttcttatattttgtacgtgattttttccattgaggagagatatctgtgcatattcatgctgctcatatttcatccacaaactcggttcatatttcatccacaaacataattttttccgttgagaagagatacttgtacatatttatgctgttcaaattcacatttcatcattcttttacaagaaatagataatgtattttaaggttttccagtggtattacagatattttactgggtgtatagatagaaattaaaccaaacttctttgttctggccgccagtcatgcatcctgttttcaacatagttcacatacaactggttgtgtaaaaatgaaattattttgtttagtacaatcatcaacagttggttgattagatttttaattatcaagttaatcattgtcattatgcttctcatcgcactcgtcattaattgctgtgggaggaaatttgttatgttccctatgagagggtgtatcacaaattcaaataagaattcaacgacaatggactgtataaaggaaataagcaagtccatggaaaacatatttttttccggaaaggattaaaatatttttaaaaaggaattaaaaaaaaattgggcacggtggcaaatgcctagagtcccagctgctcaggagatggagacagaaggattgcttgagcccaggaataagttggaggctgtagtgaacagtgattccaccactgtactccagccagggcaatagagggaaaccctctttctaaaaagacaaaaagaaacaaaacaaaacaaaaaaacaccacatcaaaaaacccaacaacaaaatgaaaaaccaaataacagcaatacaattggagctattcgatccaaagaagtaaatgaaacataaagcaaataaaagagaaaagctaatacctgtgtcctgcaggactcagtccaagttctgctctgactccctcctggtgagccaccccttaaaaagtcacttggggcggggttactttgacagacagtcttctgtcaaagagggaggcggtaaatagcacttttttttttttaatttaacgcctttccaacaaattagcggctatgttgtctaagagtgcaaatgtcagaggtgggtacaggcagcaagaccctccccacaggggcagcagaaggaggaatgactaagggaacaagactttagtgtgctcaactacacaggacaggaaacagatgctttttacaaaagctggtggacttgaaggcagaatattttcaagttcctgtaactgcgaactatgacctgtagcctgtgagagtgactttctgtggcaaaggagcttttgtgaatgtgaggaagttaattatcttaacagtgggaggttctcccggcttatctagctagaccctcgtgaaatcccaagtgtccttaggaaggggaagcagagagagatttgagtccagaagaggaagaaggtgatgtgaggcccagtaggggaacaaagggcgatggcatgtaaacacttagcccccagaagtgggagagggctggggttcatcacaccagaatccctaacaatcagccttattttaattacccttgaaatggaaggaggccttagagagccagaggcttggaggggcaccctctgctgcatacacagatcccaactgctgtgggctccaaataattgcaccagggaaatcacaaattatcaaaaataaaggatgtaaagcttttaaaaaatattaaaagcccaacaaataaaaaaagttctaaatctataaaattgacctcagtctgtatatttagatgagtcatgtgtatatagcgtttcacttcaaaatatatgataaatctctcattcattggcttaaaaataaacacttcaatcaagtctttatcagaaaaattgaaacgttaactcaattgccttttagttcatgtgactttacaaaacttaaaacaataaagtcagttttaaaaattattagtaaagtaaaagaaaaatatcttcacaatgtagacattttgtccacatgagacatgtgaaatattgccattactaaatatttgcaggtcaaaaactgtttccaaaacattttaaataatcatctggcctgtctgttttagagcattcaattctagctgaggtctggggacatgtgaaaggagccacggcccgactccgtgctgggaagagtcagacattttccacagctctgtcctttgctgtgggctctgcaactcctaccaattaaaattgcttacgtttttgttttatttttactaaagaggggttcctaaaagctaacattatactgagtatatgtaactaaaactactaagaaaacaatttcacaattatacaaatgtgccaagtaaatgaaaaaataaactgtattttaataaaggttataaaaagaaaaacatatagtggtgtgaggactgtctcaggtcttcactgagcaagggatcatgacattctatggcggacagctgaccttggctttctgctcctcttgattatgtctactaagtgacatacttactctttttccacctgtcttgcctctaagggtaacaggttttatgagatccctcctagtgctttgcaggtcagcctccctttgctgcattccaattttactgcctataccctccagctggcttttgatgacaaaagtcctggtcccagccattctcagattctgtcatccccgtgggcactatggagctcagcactatgggaggttccccaaaaatctcgttttctatgaggaatggccaccacctgcatctcagtgatgctagtgacccctttcctactcctgtgctcactggtcctcatgaagatcctggttggtctgtagccccctatttttcctattaaagagaaattacagtaagacccatttgtgtgcaaaatcaattttaggcttattacacttggcctgataatttgcataaaatgcagcaagaattcatcggccatataggctacttttgagttaattttcctgggtttttacctaaaaatatactattttggttagagtcttgtgaaaataaccaatgtgttcaattgttttattttaaaaggctcttactgaacactataaatatgtataagttgaatatacaaactatattgtcataaaatcacaacccaaaatgtggagaacgcagagggaaaggtaaatttgctcgcaaaaacatacttcacccaaataactggaaaaaaaaaaagactttcatgacccttctttaaccagagcagcagctttcaaacaaggtgtttgccttggaaatgccattcacaagccaaacggcccttgagagctgtctgtcaggcactgtagaatctagcagctcctcacagagttagaaatagtttcaggaaagagattccctgcttttagtaactgcactttatattcccagatagcgagattgtatgtaaaccatttttatcttattctggaactcttttgggtactttttttttttttttttaaatgatggagtctggctctgttgctcaggctggggtgtagtggtgcgatttcagggtatgagaaaatgcagctggacctggctctttccaggaagaccctcacagccaaggagtccaaagcctggggttttcatctaattccagtgtgactggggtaggagcagctttggtgctgggtgtgtgtgtgtgtgtgtgtgtgtgtgtgtgtgtctatgcctgtgtctgtttagggtgttaggctcgtggttgtctagatacaaatgtcccagggctcaggagccccagggttatgtcaggggcaccagatgaaggtgtcaacagaagttagggcacaagggacaaaggtgagagcaaggttagattcatttaggtgcaagaaatcatagagggaggagggagaggaagccctcctgctaccaccgaggaagaagcgcagcttaaggcagaaagcctgtccggagaggaagtgagtttgagggcagggctctctgggtaaagtacggtctgggacaccagcctgggggaagggtacagaatgcagagtggcctggcgtggggactaagaacagaggagagcagctttcactgggagggtcagtgttttcagtgtccagcactgagcaaggtgagatttgggcagcttgctgtgaaataaggtcaggctctggcattgtccccattgcgtgtgtgtgtgaggggcactttgggagagtgaactctccacctccatcctctcatacgtccttcaaccgagcttgccagttaccctgattccaaggagatctatttattgttgacaatactggatcctagcagaggctgggtaggagcctgggcacaagcaagtggaggagggggcctgggcctgaaagacctgggaggtttgagagaggacacagcccacagaatggagcagatggggtagagtcggcaagcattcagggctcctagtaagttggacaatggagaccctgaaagatccagtaaaacggggagaacaaacaggtccccaactcacatccttgcagtgcctggagcttcagactccagacaggtggggaaggaaaattgagggatgtgaacatgttggagaatgtcgtgccctgaagaatgaagaaaaggggggtgaggaatgagagcaggaacggcttccagtgcctggtgcccaggagaactcagaaaatgggtgtggtggagaggaatcgaggaaccggaagtggtggaagtgtgcagggcccctccgagatcactgtgactgccaggcgtcctccctggctggagagcttcactgtcctccttcccagccaaaatgtgtcccttgaaagcttcctccccaatggactggttctgggtcctatatatttgaaggggtggcctgcctctccacacctgtgggtatttctagttgggtgggaggagagacagagaaaagaaataagacacagagacaaagtataaagaaacaacagtgggtccaggggaccagcactcagcacaccaagggcctgcaccggcaccggcctctgagtttcctcagtttttattgattattattttcattatttcagcaaaaaggaatgtagtaggagagcagggtgataataaggagaaggtcaatgaaaaacatgtgagcaaaagaatctatatcataattaagttcaagggaaagtactatgcctggacgtgcactcaggccagatttatgtttctctccacccaaacatctcagtggagtaaagaataacaaggcagtattactgcaaacatgtctcacctcccgccacagggcagcttttctcctatctcagagttgaacaaatgtacaattgggttttacaccgagacattcagttctgaggggcaagcaggagacagtggccttcctccatctcgactgcaagaggctttcctcttttactaatccacctcagcacagaccctttatgggtgttgggctgggggacagtcaggtccttctcatcccatgaggccatatttcagactatcacatggggagaaaccttggacaataccccgctttcaagggcagaggtccctgcggctttccacagtgtattgtgcccctggtttattgagactagagaatggcaatgacctttaccaagtatactgcttgtaaatattttgttaacaaggcacatcctgcacagccctaggtcccttaaaccttgatttcatacaacacatgtttttgtgagctccaagttgggtcaaagtggctgggtcaaagtggctggggcaaagctacaaattaacaacatctcagcaaagccattgttcaaagtacaggtctttttcaaaatggagtctcttatgtctttcctttctacatggacacagtgacagtctgatctctctttcctttccctacatatattcatggaccacagtcttcaaggagtccatttcctcactgtttttggtttgatttctctgaaattaggaaatgccccattgaggcacccaggattgtctttacttcccccagagcttccactcctgaggcaggagcttctcaaacaccccccaagactcaacacctaatttcaccctctgaaaccttcccatttcttaaatccaggcagggtcatggtccttagcccctcagatgctgtggagaccttctttccctttcatacattctctcaagattaaaagccacccctcctcagcacacaccccagagactcaccccaacatgcattgcaaatcaccctggaaacagtcataagaccacactcatttaataatattttatttatcaaaagacactctttctcaggtaagtgaagttctggagaggaaaagaggagtcctgatgtaaattgccctgcaggccttgctgagatcacaaggagattgttactgcagcttgtagcacaatagtaaatttcttctctggatggaagttcaacaatccagatcgtagtatattccttttcattatgctcagtccagcaaatgtgatgataacaaattccttttcatgatcatccattcagcagagaaaatgtttgtaaatgtgttttcatgaagatgtttaccataacatacaggatttaccattatcaatgcatccacaaactctgctgttgttttttatacataattttttccatcgagaagtgatagttgtacatattcatgctgttcatatttcaaccacaaactctgctggtttttttatacgtaattttttccattgagaagtgatacttgtacatatttgtgctgttcatatttcatgtttcatcatccttttacaataaataggttatattgtattttaagtttttctaactgtagtgcagaaattgtactgggtgtatacatagatatcaaaccaaatttacttgttctggctgataatgcatcatttatttcatagattatgtatttctttgacacatttcacgtacaactaattgcataaaaatgaattttcttttagtatagacatcagcatgtgcttaattcggaatttaattgttgagttaaacatcgtcattgccttttccgttgttattaattgctctggtgggaattttgttatctcatacataagacagtgtgccacaatatctcttaaaatttcaatggcaataaactttatatttaaaaacagggaatctatggaaaacacatttttttctaaaggattaaaatatttttttaaaataattttctaaaaagttaggcacggtagcaaacgtctagagtcccagctactcaggaggctgagacaggaggattgcttaagcctacgagttgggggctgcagtgaactgtgattgcaccactacattccagccagggcaatagaagttaaccctttttctaaaaaaaaaaaaaaaagaaagaaagaaagaaaaaaagcaacaacaccaaaacctcaccaacaaaatggtaaagaaaaaaaaaacagcaatacaatgtaagctatttgatccaaagaagtcaatgaaatttaaaacaaatgaaagggaaaaagtaatacttgagtcctgcaggactcagtccaagttctgctgtgcctccctcacggtgagccacccctttagaagtcacttgggtcataagttaacccgataggaagtgtcctggccaatgaactagggaggtggtaaatggcaccattttaaatttaaattcacggccttttcaacggatcagtagccatgttgggtaagagtgcaaatgtcagaggtgaaaagaggcagcaggaccctcccctagtgcttgggcaacagaaggtggaatcactaaggggacaagactttagcatgctcaagtacacaggacagaaaacatgctttttacaaaagctggtaaatatgaagagggaacattttcaagttcctgtaaccaagaactaccgcctgtaaccggtgaaagtgactttctatggcaaaagcgtttttgaaaaggtgaggaagttaaatatcttaatgttgggaggttcttctggtttatctggctagaccctaatggaatcccaagtgtccttatggagcggggagcagagagagagatttgagtccagacgaggaagaaggtgatgtgagtctgggtgcgggacagggggagaatgatgctatgtggggatctgggctggggaatgacttagctgcatgagcggagtgacttagactcctgaactagaagaaatctagggctcatcacctcagcagccctaaccatcaaccttatttttattacaggtcttccatcgacggactccctaaaaagccagcggcgtggaggggcgccctctattggacaaatagatcttgactactttcggccctcaaatagcctgactaggcaaataacaaataataataatttttttttaaatcatggaaaatattttaaaaaacaattaaaaagttataaatctataaaatctgcttctgtctgtgtgtctgtatatttagatgtctcatgtgtacataatgtttcactaccaaaatatatgatgaaaccctcattaatcggcttagaaaactaaacacctaaatattttctcagaaaatacaaaaactttaactcaaatcccttttaattcacctgactttaaaaatctttaaaaaataaagcatgctttaaaattattagtaaagtaaaattagaacatcttcagaatttagacatttggtttaaattatacaggtcaaatactgcccttagtaaatattttcaggtcataaacaactcctgtaatcttttaaataattgaattacatgtctgttttagagctttaagttctagctaaagcctggggacaaatgaagggcaccatgccccctctctgtgctggaaagagacattttctacagctctgacccttgcagtaggctttgcaactgctacctatcaaaattgcctacatcctaagtttattattaaaaggagttgcttggagttaacattataatgaatatatgtaactaaaactatttctcatacaaagtatatgaaaaagtagaatgtatttttaataaaaagttataaaaagacatgaacatgtagtttttataaaaaacagtaattttgtctagttttgcagttctaaaaagttatgttaaattcaaaaataaaaaataacaagacaagactcaaggtttaaataagttgtaaaagatttgtaaaaattagttctataaaaattttacaaaaaaaagcattggttaaaatttaaggaattattttgtttttacagaaattaaacattcattaaaaacactctgatacaaggccttaatttgggttcatgtatcagaatagcagggttttcttagaatattaatctattctttaaaagaactatgaatgttatgcaaactttataaaaatcttaccttagagtcaaactgattaaaattccatagattttacgtaaaattttattaaaaattaacttcaacaaaaataaaatttgattttctcctttaaacaaaagttttgcgtaatattaaataataaagcatttttgtttaccttttaaactataaacacacacacacatacacatacaccaacactaaagtcagctgacctcatactgtctttattggatattcttgtttaaaaaactatcttctttggaaaataaagttttttattttaaaccatattttaaattatcattttgactaaatccataacatacagtgatctgtaataattctattttataatatcaagtgttttgaagaactccaggaacagccatgagagaacactgtggtttagtaacactttatttcctcagtttgaaaatagttgtctttcttggggaggccggtttcagcagatgaaaacaagagtcatgatgaaaattacccagcagtggttagtgtgaccataggaacattgtcatcaggtcagcagaaaacatatcagcaaatttttctcatactggcagtgtgtaggggtggatgtttacagttcctgaagccccagtggtcgtgtggtcttttagttttgccatttataggcaacttgtggtaactagctcaattagacacattccttatcacaaggacagagggctttctgtatcctagggttcttgccttggcattccagaagaatcaggtcacacgtggacgtggagaatgagtgcaaggttttattgagtggaagtagctctcagcagatgggggagccagaaaggagattggtttctccctggattggggccgttcagcagccctggctctcctctgactgccccaggcaaaatccacatcgttctataagtcggtgccctgctggtgtgctggtgcctgttgtcatgttcctcttcatgtccagccgcctgtgtgttcctccgctgatgtgctcctctcgacgtcaagcctcctgtgtgtctgactgctagggtcttggggtttttataagcacaggatgggtcttagcaggccaggatgatcttgggaaagacaacattcggtcaggaaaacaaaaatgcctgttgtcatctaggtccgtggggacaagcccaggtgtggagcttttagccagggaccacagcctcctgtatccaacacttcccttcaccttttctatatcattcaaagggatcatgcccttcccatcccagcacttcactttcatgtcatttgccccctctgaagaggtacatctaactgccattagaatatggatgatgaccagtcttagctgcttcctgctgaaagggggcattgttttgggggaaaacggcagtcagattcctcccaggggtctctataataaaagatcgaggtggctactttcaggaggtcctctaatgtactatctggtcccaagtcccatttctgcaacctcctcctgatgtcaggagctgcctgagtaataattttatcctttaggattatctgtccctcgattgaattaggagatagagaggtgtgatttaccaaggcctctcttagcctctccaggaaggcagtgggattttcatcaaatccctggttaattatggacaacttagtataattgagaggcttggtcttagacctacgtaagccctctattatgcacacctgaaagtgtctcctcttccagtcttccatctcattattgggatcccatttagggtccttcactggtgctacttctcttccagttggataatattcgctcccttccctgatgctataggtgatgcaaagctcatccccaaatctctctgctgctggcagagcagcctgcttctcagtgtctatcaggttctgactcaaaagtaacataacgtctctccaggagagttcaaatgttagggtgaaattctggaaagcttctatatatctatcagggtcatctgaacacttgcccagatctcccttaatttgctttaagtcttgtagggaaaagaggacttggaccttactgggcccaaattcactgggcatctgtaggaggggcaagagtgagactgggcttgtttgggatgaagatttctaggaggggccaggtgagaggctgaagctggatacggaggttggggtggacccagaggagcagggcttgagggagctggcacgtcagctgggggtgcgtctgggactcgtgtctttaattccctgggcttgaccctggcagccttccccgagacagcaaacaggagggctggaacaatcctacatgtcagcaaaggtctggattgctttgcaaggtatagaaagcctgcacatttggggcctcagaccatgtgtcctcacatccagagaaaagttctaattgcaggatggtattgaaatgaatggtcccttcctgaagccaagccagtccttcctgtaaaccataatttggccaaacctatgtgcggagggctatgagatgcttttcctctggattctgagggtcaaaacagtcccaatggttcaggatacactcaaggggagtacaagctgggggtggtgaggagaactggctgcccattctgaaagacagggaatagaggtgttcctcatttcccttccttcttttggcaaaaagctcagggtgtgatggggagggaaagcaagcatcttcacttcactttccacctcttacccctgcgccctggcaaccttggcaggtgccggccacaggtacaaatgcggtatgtacccatgaagcagggagaacctggagattaggaattaactgccctcacctatgtttccttttctccctgctgttgaaaaactttgagttccctgggcctttttatcccatgaggcatggcctccttctgtgggatggggttcagtcagcaggaattggtcctgtccatttacattgtgcctgttgcctggctttgaattcctcagacctgctttctctttctagggcctcagcctgaagcttggaattgagtttgggactgaaaaagcatttcagaggctgtttatatccatttagtgcctcaaataagccctgctgaatttgcaattatcagccagcaggggtcactcctctgttaacttccctattagaaacagagcggtggggattctcacttagaaaagaaaaaaagagaaaaacagttaaagaggcaaaaagtggggaatgctgggggaagaaccccttgcttagtgcaagtgggcccctctaatccttataactttcccatccttcccccagttcagaccaggttgaattccttggccatggaaggaaaggttccattgatgcagtgggtgagaagcactctgtagggtcctggctaccatcggttttctcacacccccctcatcccaggcagtggagggagacacttctgcgacattgctccccctgccccttcatggctattgggtgtggcctttgcctgctgcaggcatgcctaggtgctggagctgggagggaaaagggtaaggagaggtgccctggaagccgctcatgcctggggctgtcaaggtggaggcatacatggcacctctaggaaaaattggtctgatttgcacctttggcggctgagccaaatgctcattttacttagtaacattgcctcagcctgtagcaaaactcttaacattataaaggaagagataagatccatttcaaataatgtgtgagagagaaaagagatgaaaggaaaacagagtcttttacctgcaggaaagggagagaagtggcagagttttggaagaaaggcaggcccaacagtttcccattcactcacactcaccttccgagatcccagacgagccaccagttgaaatgggaaaagtttccttgtccccctcacaggaggtggagtgggggtgtggcttgcttctttagtactccgctgctcaaacctctagggaagcatacagactggcaagttgtggggctacaaccccatggcagcatctaggggtagatgtttacagctgctgaagccccagtggacatgtggtaccatgtgctcttttagttttgccatctataggtggctttgtggtaaccagctcaattagacccattccttaacccaaagacagagggctttctgtatcccgcggttgttacctaggtgtaccagaaaaatcaaatcacacgtggtcttggagaatgagtgcaaggttttattgagtggaagtagctctcagcagatgggggagccaaaagggagaatagttttcccctgaagtcgggttattcagcggcccaggctctcctctggctgccccagccaaactctatgtcaatccattggtcggtggcctgccagagtgctggtgcctgttggtggattcctctcagcgtcgagagtttttccctctcaggaaagggagagaagtggcagccacccatgtgttcttgcactgatgtgctcctctcgacgtccaacctcctgtgtgtctgcctgctagggtcccagagtttttttaggcacaggatagggcatggtgggccagggtgatcttgggaaatgcaacatttggtcaggaaaacaaaaatgcctgtcctcatctaggtccaggggcacaagcccaggtttggagccctagccagggaccccggcctcctctacccatcactttccttcaccttttctgtatcattcaaagggaccatgcccttcccttcccagcacttctcttctgtatcaataggtgatgtttttaaaatttcccaactctagtgcaggcatggtactagacatatacatagaaataaaaccacacttattcttctggctggcaagacatagtatttttgccaaattatgtgttgttttgaagcattttatgtacccctggtcatataaaaataaagctattttgttcagtacaaacagcagcattttctggattagaaagttaatcatcttaaaagatcatcacggatttttccattgcactcatcactaattgctttggcaaaaaatttcttatctcacgcatgacaaaatcagccgcagtatctcctagtaatttaatggtgatgatctttataaaggaaataagcacatcaagggaaaacataattttttttaaaaaaagagtaataaaactttttaaaagtcttttttaaaagactgcttttctaaaatagtaaaataaaactccaccaataaaaccaccaacaaaacagaaaagaaaaaataatgatatgatcggagctatttgatgaaagatggtaaattaaatttaaaatgattagaagagaaaaagcaatacctgtctcccgtaggtctcagtccaggttctgctatgcctttctcctggtgagccacctatttaagagtcgcttaaagcatatgttaatccaacaacagcagattaaaaaccaatgcaatctgaactatttgatctaaaaacataaataaaatttaaaacaaataaaagagaaaaagcagtacctgtgtcctgtaggtctcagtccaagatctgctctgactcccttgtggtgagttagccctttagaagtcacttggggtggggcatatgttaattccactaacattggttctggccaatgagtcaggaaggtggtaaatggcaccttttcttcttgctgatttctttcagttcctttggagtctggacattagtcctttgtcagatgcctagtttgtgactactgtttcctatactgtgggttgtgtgtttaccctgctgatatttcttctgccttgcagaagattttcggtttcattaggtcctattgatcttattctatttttatatttttgcgtttgcttttggggcattagtcatgactacttggcctaagccaatgtctagaaaagctttttggatgctatcttgtagcatttttagactttcaggtcttagatggaagtttttatatgctttgttaaagatcaggtgactgaaagtaccgggctttgtttctcggttctctattctgttccattgctctatgtgcctatttttatacttcctgcaccatttattgaataaagtgtcctttccccaattagtgtttttgcatactttgttgaagattagttgtctgtaagcatttggctttatttctgggttctctattctgttccattgctctatgtgcctatttttatacttcctgcaccatttattgaataaagtatcctttccccaattaatgtttttgtgtactttgttgaagattagttgtctgtaagcatttggctttatttctgggttctctattctgttctattgctctatgtgcatattttataccagtatcatgctattttggtgattgtagccttgtagtataatttaaagcctgccttcagatttgttctttttgcaaagtattgctttggatatgcggtcacgtttttggttttgtataaattttaggattcttttttctagttctgggaaggagaatgatgatattttgatgagaattctactgctctgtagatggctttggagagtatggtcactttcacaatattgattctacctattcataagcttataatgtgttcccatttgtttgtgtcaactgtgatttctttcagcactattttgtagttttccttgtaggaaacttacattaacctacttggttaagtatatttctaagtattttacttattaaaaattctcagggaaatgcaaagtaaaactgaggtgggaaattaaagaaaaataaaattaaaaagaaagggaaataagctttcttgtattaagctaacttgtcccagaggcagcaacaggcacagcccagacccaggaaaagtcttgataatattatttattgtattctggagactcttccagcactccttcaatgtagggagaagaaaaacaaattttcctttgttttatggtatgagtttatagattcttgttctctttaactagtaacttcaagtattctgttttatctaagaagtatggcaaaggtcatgagaagcctgagcaggcctgaactacagctctctaggcaccatagtgaagataaaccaatgcaagcctctttagagcaaaacctagataatagacatctgggttgcatagcaacagttatgtgcaatcctgagttatgaacctgttacaatttgattaactgtctttttcctgcctctgtatccctgctttcacaccactgtaagcttgcttcaagctggcccacccccttttgtgaagtgtgtataaaagtcaagtgctgtctttgttccaggccctgtctttggacgtgagtctgctgggcctgagagcactcaataaaagattctcctgttttaacccaaagcctctctctcatcctcctaaatcccacaacaaaaccacaatgagatgctatcttaatcttgctagaagcccataatttaaaagtcagaaaacaatagatgttggcatagatgtggtcaaaagggagcactttgacactgctagtgggaatttaaactagtccgaccactatggtaaacagtatggggattccttaaagaactaaaagtagaccattcattccagcaatcccattactggctatctacccaaaggaaaagaagttattccataaaaaagacacaagaatatggatgtttatagcagccgattcgcaattgcagtgatatgggaccaacttaagtgcccatcaacgaacgagtggataaagcaaatgtggtacaccatggaataatacttgataataaaaaggaacaaaataatgtcctttgcaacaagttggatggaactggaagccattattctaagtgaagtaactgaggaatggcaaatcaaatattgaatgttttcacttttaaatgagagttaagctatgagaatgcaaaggcataagaatgatataatggacttggggactcagggggaaaggttgggagggggatgaggaataaatgatgacatattgggtatattatacactgctcaggagacagatgcctcaaaatctcagaaattaccactaaggaacttttatccacataaccaaaaaccacatatattccacacactattgaaagaaacataaacattattttaaaaaataaagccacttttaaaattagcaaaataaaataaatatgtcttcagagtttagatattggatccaaattagacagatcaaatactgcctttactaaatattttcatgtcattaacaacttctaaaacctttcaaacagttttttgacatgtcttggaaccatccatttctagctaaggcctgggcacctgtgaaatagggccatgcccccccttatactgggaagagtaagatatttcaagactaagatgttttctacagctccatctttttctttaagctctacatcaaggacataattaaaattggttgtctcctaagtggtttactaaaaatgcatacttaagagttaccattataattaatatttgtatctaaagctacttaaaaattttcacacacaaatctgactgaacaagtaaaatatattttaagtcaaagtttataaaaggacatgagaacatagcttttatgaaaaaattagttttgtcaagtttagaggttttcaaatattttaaattcaggaaataaaataacaaaaagacaaaagaaaatggttgaacaacttagaaaaggtttgttaaaattcatcttataaaacaatctacatgtaaaaagtgggctaaaatttgaaagagattatttaggttttccataaattaatccagaaggggtaggaagtcttaagaatgaggaaggacaggaggaaggggaggtcatcctgacactgcagaggcagaagtgcagctgaaggtatgaaggctaagaggggaggggagtttgagtgctgctgcctggctgtcagagcagaggagggtcctgggcaccagacttgaggaagggatgaaaatgctgggcagacctgtagtgggcccttgagatggcagatagtggtttccagagagagggccattgttttccagtgcccagcactgagcagagagagttttgggcagtgtaaaaaaaaaaagagaacttacctctttctcgttttagaaaaagaacagtctaagaatatcagcagggaaactctcagtgcttcaaggggttaaacgcccttttggctttcttgtgttggtttcatcatagaggaggagaaacttcttggaagtgttcctaaaaacacaacacgtctgcttctcctttcaaaaaaggaagtgctaaaacacgaacactctagatccaaatattaatacggatgtctaaatgcttccgttttccaaggggcagaaagctaaaggttgtaacctattcatttcagtcaaagttggtgaaagggaagcaaaggaactgggtggggcttggaaggatgacgaagctcaagctcattggccagcaacctctctcctgggggcgggaggggtgagcatacgtcattgctttggcttctataaaatgaggaggactcaccgagtgtgaagagtccttctggtgattgcagctgagagcacactcacgacgttctgcaaggattctctgattatgattctgaagggaaaagcgatggaatggacagcagagattgtaattttctttatcttgaattacggaagaaagtatctaggacagaaatccacgacaagtccttggaaccagcagatctcttcgttcacggagacgttgacgtattctctattgaagaagattcttaccttcttactggacaaggttttgtcagttctgcgtgactggattgtccgggagactctgaggaaactgatgtcacatgtttttccaaagaagatgtttctggaaccaacaactgtgattgtggtttgaggacttctgagagttccagtacaggaaataagcagaacatcagctggaggctaaacggatccagacttcactcttcacttcccttcctattcagtctattgtgcctgctgactgagaagcttggctggtatgtgagcaaataaacggaactattcagaaggagatgttgacatattctgtattgaagaagatccttatcttctcacctgacaaggttttgtcagttctgtgtgactggattgtccggaagactctgaggaaactgatgtcacatgtttttccaaagaagatgtttctggaaccaacaactgtgattgtggtttgaggacgcctgggagttccggtatgcgaaataagcagaacatcagctggcggctgaagggatgcagcctccactcttcacttcccttgccattccatctattgtgtctgcctgactgagaagcttggctggtatgtgaggaaataaacggaattataaacaaggagattgtttctcatctacttcattctgttgtggcttttctattttggggttcagggtgtgtgacaaggaccaaggagatgaaaggtttcatgatggagaaagcccaggcaatcagattgaagagctatccacagggaatcttggctgctgaggggctgcaccctgcaacggactgaccatatgacagaaaagggttttaaaggctcaacttctggactgagaacccagagtaatttgggaacctcctctgtgaggagatatgaaagctgggaatcatgacatccctaggaatggaaggcacatttcctgatggaaggggtgctttggaaaacaggagcagagtagacacagcagccttgtggatacgggtgggcagcatgcatgggtgatgtgaacgtggagtgtttgtgatcgaaactcaaaatgtctgacaaagtgaaaacctagaaaccacaatgaggaggaagagtttgtgagggcaatcactctccccatgtgtgaaaatcgggggctcttaaaatctcatctggagaggtgcagtctaccaaactctgggactttagcctccccttttaaaaaaccgtgcatcaataccaacgtccgaaaccacagaaataacacctggcttgcatggagacaaggacaaaaagccgtcatgatgagttgttctgctcacttgctgcctctgttcagtgcacaggatattgtccacccactagcaggctactgcaagagaagtgtgcaatatgttccctatgtgccatatatgtgccatatggcccatatgacaactgagtcagaaaatatctgatgccctcagagttacactccacctggagcttgcccccagccatccaggacctaggctccctaccctgtccaattttctggtgttttgggggcttcattctctaaggtgtgcccactctttactcaaaccaaaacacccacatattcctgcccatgaacaaccaatcaaccacttctcagttccacatcctgctgttgggtctctagtggtgacactgtaactcccaggtcatagtggtgacactataacacctagctaaattgatgccttgtctctaggaggccatgggctcctgcaggtctcatctgactctctgtagccttccctgacaatgctcacaatacccaagccagagccacattgacagcaagctgctctcatcttacctttgccagacctggccactggaaaaggctgaccctcatcctgcaatgcctatacctccaacctttgtctcaagctggtgtcctggagggacttctaagcagaaaacagattcagactcccatcctctcctgaatggcctcatatccaattctcagaccctcagccttcattgtaaggacacttcatccatgcccttgagtattctgtctgcactgtgtattctgcaatagattctcctccctctgcgaccctcaactccttccgcagactttttgttttcttgatcatctaccatagtcttccactgggacactgccaagcccattctggagagtgagttgtgcaagtacactgccccccatctacctttcgggaggtgtatacacccttctttctcccaggtctggaggctttctattttcatcctgaggcatctccacctgctcttggattcttcaaattgacaaccaccagttaacaagaactatgtgtcaccaaatagccaaacaatggcaattacaaaaataaaattaatagctgtaacccccattagcaaggatacacaaatcaaatcagggatagtgggtgaggaagtctgcctaacattcaaggaaggattctgaagtgatacaaaatcattgcctttgctatctttagaatggacactttcagccaggcacagttgctcagcctgtaatcccagcactctgagagccccagttgggtggatcacttgaggccagcagcttgagaccaccctgggcaatgtgcagaaaccccaactctactaaaaatacaaaaatagccagttattgtggcacatgcctgtaatcccaactccttgggaggctgaggcacaagaatcacttgaatctgggagccagagtttgtaatgagcgaagatcatgccactgcactctagcctaggcattagagtgataatctgtctgtggaaaataaaaacattcctcttcaaagttttcttctttaaatcataaatgttggaattaatatatcctctttgaaactcactttcttcaagcttctttatttgatggtagtaaatctttgttaagctttatgaggcaagagtaatggaagaagcatattatatatatttatactctaacctcagtgcttgttctagcaagctcaggcatgcgtgaatgtgcccaggcatgttccagcccataccttatatcctttccttattgggaaatgctgttactcctataagcattcttgtaagcaacttcctctttttctttgtctccactatctttacctattgaggacagttttaggttcttagccagttggatgtagcatagactgtgaggtccaaccccagccaatggagatagcacacagcagtagcgacctcatgcttaacagataaatattcctgtctccctttgtttggggtgctctcagctgatgagcaacaccctttctaaagaaattaaagttgtcttgctgagaaaacttttggtctaaatgctgattcttccttgcagcactgaagaagaagcaattatttccaacactttctcatacacaaaaaaagaagaaggtggaagaaaactttcttgtgcaccctatccctcactcagaaagacaacagaaggctcctagtggcaagccctagaggattcatttcttttgggaaccctcttggctgggatactaggactcaggtcaaactcagcattttcagtgtgtgggaagtgtgcttgggtttcactgttacttccaataatgtgatttggtccttggggttcaccaaattttggtatggagtggtgaaccctgttaagtttaagtgtctataaaattaacaaagcaaaataaccattctgccccatggttcagagaccaaatattgtgtaggaaatgctttagcgagagaaacagagaagaataaaaaatgtcctcaagcgctgcattatttcttgttatcgtccagatcttagaggaaaggctttcattttccctcattcagtatgatattagctgtgcatctgtcatttatggcttttattatgttggggtatgttccctgtgtatgtagttttttcagggtttttgttatgaagtgatgttgaactttatcaaacgtttttcagtttcagttgaaacgatcatatgctttttgtccttcattctcttgatatgatgcatcatgttgatgatttccatatggtgcactgtccttgcatcctgggcatgaattccacttgatcatgacaaatgaatttttaatgcattcttgaattccgtttgctggtattttgttgaggatttttgcatcaatattcatcagagatattggcctgcagtttctttttttttcttttttctttgttttgttgtttgtttgtttgtttgttttgatgtgtctatgtctggttttggtatctgggtagtagtgttccatccccttttattttttagaataatttgaataagactggtgttggttctttaaatatttggtagaattccgaagtgaagtcattgggccccgggcttttctttagtggaaggctgtttattatggcttcaatctcgttacttattattggtctattcatgttttgaatttgttccttatttaatcttggtaggctgtgtgtatctaggaatttgtccatttcttttagattttcaaatttattggcacataattgcccattgtagcctctaatcgtcatttgagttcctgcagtaccaattataatgtctccttcttcatttttgattgtatttatttggatcctgcccctttttttcttacttaggctgcctaataatttcttaattttgttgaactttttcttttgtttgtctcgctctgccaccaggctggagtgtagtggtgtgatcttggctcactggaacctccgtctcccaggttcaagcaattctcctgcctcaccctcccaaatagctgggactacaggcaagtgccaccactcccagctaatttttgtatttttagtagacacgggttttcaccatgttggccaggatggtctcgatctcttgacttcataatccacctgcctcagcctcccaaagtgctgggattacaggcatgagccactgcgcccagcctaattttgtttaaattttcaagaaatcaacttcttctttcattgatttctgtattttttatttccattttatttatttaaactctaagctttattctatcttcttctcattttagctttggtatgcttattgcctctctagctctttaatgtgcattgttagattgtttatttgaagttcttcctctctacaccataagacgtaagcatgtcctcattatgtcataagatgtaaccacttacagctataaacttccttcttagttctgcttttgctgtatctcataggctttgttatgttgtgtttccattatcaattgtgtcagaaatttttcaatatttttcttaatttcttcattgagcaactgatcatttgggagcatatttttaaacttccatgtacttacatagtttccaaaatacctcttgtgatcaatttctagttttattccactatggttcaagaagatgcttgatattatttcaattttttttcacattttaagatgtgttttgtgacctaacatatggtctactttttttttttattaaactttaagttgtggggtacatgtgtagaccgtgcagttttgttacataggtatacacgtgccatggtggtttgctgctcccattaacctgtcatctacattaggtacttctcataatgctatccctcccctaacctccaccctctgacaggacctggtgtgtgatgttcccctccctgtgtccatgtgatctatttttgagaatgatccatgtggattagaatgctgtggaaaagactttggattcctaatatccagggagggagacgatgatattactttcaatatcacacgggtgtacacactctctgtgacattgttcctaatatccagtggaagagaggatgatataacacccagggagggagaggatgatattactcttaatattgcagggtgtgtacccatgcctatgatattgttcctaatatcaggagggggagaggatgatattactcagaatatggcagggggtgtacacacactctgtgacatggttcttaatatacaggggagaatgggacaatattactctcaatatcgcagggggcgtacaaccctgtgatttgttcctaatatacaaaaggggacagtatgatattgttcctaaaatcgcagaaggtgtacaacgccctgtgatattgttcctaatatccagggcgggagaggatgatattacccccaatatcacagggggtgtgcactttccctgttacattgttcctatgatccgagtggggggaaatgacattagtcccaatatcgcaggatgtgtacactactcccccatgatattgttcctaatatcaagggggagagaggaggatattactcccaatatcgcaagggaggtacatcctccatgcaatattgttcgtaatattcaggaggagagaggaagatattactctcaatatcgcagaaagtggacacccaccctgtgatgttcttcataatatccagggaagcagacgattatatgactttcaatatcgctgggagtgtacatcccttttgggatattgtttctaatatccaggaagggagaggattatattacttccagtattgcagccagtgtacacatttcttgtgatattgttcctaatatccagaaagggaaaggatgatattactcccaatattgcaggtggtgtacacccccctctgatattgttccttacatcaaggaaaagaaagaagaatattactcccaatatcgaagagagtgtacacccctcctgtgatattgtatttaatatccatggggaaagaggatgttgttactcccaatatcgcagggggtttacacccacactgtgatattgttcctaaaatccagtgaaggagaaaataatattgctcccaatattgcagggtgtatacaggccctcccccgttatattgctcctaatatccagcggtggagaggatattactttcaatttttgcagggagtgtgtaccccctctctgatatttttctaatatcaaggatgggaaaggatgccattactcccaatatcgcaggaggtgtacatgccctgtgatattgttcctaatatccagggaggtagaggatgatattactttcaatattgcaggggctgtacaccctctatgatgttgttattaatatttaggttgggagaaaatgatatttttcctaatatcctgggaaggaaaggatgatattactgtaaatattccagggagtgtacaccttcctaatattctaatattgttcctaatatccaggggtgggagaggattatattactcccaatatcgcagtgggtgtacacccctcctgtgatgttgtttctaatatccaagcgaggagaaaatgatatcactctcaataccgcagggggtgtacaccttccccatcatatcgttcctaatattcagagggaaagaagatgatgttactttcaatatcgcaggggttgtacacaacccctgtgatatttctcctaatatccaggaagaaagaggatgatattgctcccattatagcagacggtatacgcctccctgtaacattgtttctaatatcaagactgggagaggatgatatcacttccagtatcgcaaggggtgtacacctcccccgtgatattgttactaatatccagggggaagaggataatattactttcaatattgcaggggctgtacacccccgtgatattgttgttaatatttaggttgggagaaaatgatattagtccaaatatcgcagagagtgtacacacttccgataatattgttcttaatatccatgggggagacgatgatattacacccaatatcgcagggggtgtagtctccccttgtgatattgtccctaatattcagggaagtaaacgatgatgttagtgtgaatattccagggagtgtacaccccctttgtgatattgtcctaatatccgcaggagagaagataatattactcccaatatcgcagggggtgaacacaccccctgtgatattgtttctaatatccaagcgaggagaaaataatattactcccaatgtctcaggggatatacaccttccctatgatattgtttctaatattcaggtggaaaacgggtgatattactcctaatatccaggaagaaaggggattatgttactccccttatagcagggggtatacacctcccctgtaatattgttcctaatatcaaggctgggatatacgtggggggaaggatgatattactcccaatatcacaggggttataaaaccttctgtgatattgctcctaataaccatggcggaagaagatgatattactcctaatattgcaggaggtgtacactcccccattatgttgttcctagtatgcagaaaaggagaggatgacattattgccaatatcgcagggtgtgtacaccacccatgatattgttcctaatatttagagggacagaggatgatattactcccaatatcgcagggggtgtacacgcatcccctgtgatattgttcttgaaatcgaggggaaagagaattatatttctctaaatattgcagagggtgtacaccgccccctgtgatattgttcctaatagccgggggcggggggagataattaaattactttcaatatctcagagagtgtacatcccccttgtgacattgttcctaatatccagagcaaaagagaatgatattcctcccagtatcgcaggaagtgtacatttaacctgtaatattgtttctaatatccagggggaagagaatagtaatactcccaatatcgtaggggttgtacaccttttctgtgatattgttgcaaatatttagaagagagagagaatattactcgcaatatcacagggaatgtatacttcccctgtgatattgttctaatatctagaaaaagagaggataatattactcctaatattgcagggggtgtacacccccacttgtgatattgttcctaatataaaggaaggtcgaaaaacaaacggggagcccagggggaaggaaggcaggcgaggaagaggcagcgccggggcgccggagggagcagccgggccgcggaagcgcgagcacgagaccggtcgcggtcgcagtcgcatttttgccgttgtcgcggccgccgccgccgaggcttacccggggatgtctgagcccgcgcctcgcggcccccaagctccacgctgcgcccgctgtcccggcctctaagggccgccacgtccctgcggcgcgcgcaggcagaaagcggcttcgtgccggcggagggggcccgggcgggccgggaaaggctgccccaggccccgcgcctaccccatcaccgcggccggcgccgggccgggaggatgagcggtgtggggctctgaagcatggagggggttttgtacaagtggaccaactatctcacaggttggcagcctcgttggtttgttttagataatggaatcttatcctattatgattcacaagatgatgtttgcaaagggagcaaaggaagcataaagatggcagtttgtgaaattaaaggtgacagctttggaggggaccacccttgattggatacataaattctgttcattcagcagacaacacaagaatggaattaatcattcctggagagcagcatttctacatgaaggcagtgaacgcagctgaaagacagaggtggctggtcgctctggggagctccaaagcatgtttgactgatacaaggactaaaaacgaaaaagaaagaagtgaaaccagtgaatcgctgaaaaccaaaatgtctgaacttcgcctctactgtgacctcttaatgcagcaagttcatacgatacaggaatttgttcaccacgatgagaatcattcatctcctagtgcagagaacatcaatgaagcctcttctctgcttagtgccacgtgtaacacgttcatcacaacgcttgaggaatgtgtgaagatagccaatgccaggtttaaacctgagatgtttcaacggcaccatccggatcccttagtttctcctgtgtcaccttctcctgttcaaatgaggaagcgttctgtcagccaccctggttcttgcaccagggaggagtagccactgtataaaagaaccagtatctgcacttcaccgactctcccagcgacgccgaagaacctactcagatacagattcttgtagtgatattcctcttgaagacccagatagacctgttcactgttcaaaaaatacacttaatggagatttggcatcagcaaccattcctgaagaaagcagacttatggccaaaaaacaatctgaatcagaagatactcttccatccttctcttcctgaagaaactgtagtgtccaactttctctaagtattgctatgcaaaagctgctgtaattgaactattgttatagggagtagttttttcccttaggactctgcactttatagaatattgtaaaacagacaaacaagaaaacaaaccacatacttttgaagcgtgttttatctttatatagtttgtttgcaagagtattttcctaataacttcacagtatgaatgtgcatcttttttttctttttttaacaaatgatggtgtaacattttgacatccataaggacaaatgtagatatttttctaaaaaaccgtgaggggactgacagcttggtcagggtgtattgtagcttataaacatgaaatcttacaaggtttcagtttgacagaagtgtgatatatgtaacttgtgccatggaccaaatggtcactttaccacagctaaaaatgagttatgatagcagcttgatggtgattgcattgtattcctttaatcaaaaaggaaacgcaatattctaagtatctttagcccaaataccatgacatattgagcatctttaaataaccagactgtattgtccttcatatgtgaagttgacactactgatttgtcaataccaaattttgggttaaagtgtttaatttttatttatttattttcttgttgcctcaaaagatgattgcattctaacttttgtgacctaccaaatttaagatgtgtatacattgttctttacgttgttctagaaaagagattttaatgctgtagtgacttagctcacttacatcagagaaataaacaactttcaatggaaaaaaatatatataaaggaaggaagaggatgatattacttctcatatagaaggggttgtacaccccccttgtgatattgttcctaatattcagggagggagaggattatattactcccaatatagcagggagtgtacacccccccccccgtgataatgttcctaatattcagggaagcagaggatgatattactttcaatatcacagggggtgtgctgtccccctgttatattgttcttaatattcaggggggagaggatattattatgcccgatatcacaggagaagtacaccccacaagtgatattgttcctaatatccaggggtaaagaggatgatatcgcaggtggtgtacacccctccccgtgatattgtttctaatataaagaaggagagagcatgatattactcccaatatcgctggaggtctacaccccccttgtgatactgttcctaatatccaggaagggaaacaatgatattgctgtgaatattccagggggtgtacacccctttgtaatattgttcctcatatccagggggtagagaggatgatattactcccaatatcgcagggggtgcacggccccactgtgatattgtttttcatatccaggaggggagaggatgacattactctcaatatggcagggggcgaacaccccctgtgatattgtgctagttaggttgggagaaaatgatattactcccaatatcgcagggggtgtacaccgctcctgtgatattgttcctaatatccatgacgggagaggatattactcccaatatcgcagggggtgtacctctcccctgtgggattgttcacagtatccaaaagggaagaggatgatgttactcccaatatcacagggagtgtacaccaccattgtgatattgttcctaatagccagggaagaaaacgatgatattattgtgaatattacagggggtgtacacaccccctgtgatatggtttttaatatacaggttggaaaaggatgatattactcccaatatcacaaaaggtgtacacacccccccatgatattgttcttaatacttcggtggggagaaaatgatattagtctccatatcacaggggtgtgaactcctccggtgatattgtttttaatatcaagaggggaggagatgatattgctttcaatatcgctgggggtgtacatccctcctgtgatattgttccttatatccaggcgaggggaaaataatattactcccaatagtacacaccccatgtggtattgttcctaatactcagggggaaagaagataatattactttcaatatcacagggtttgtacacctttcctgtggtatagttttcaatatccagggggaaggtacatgatattactcccattgcagcaaggggtgtacacacctcctgtgatattgttcctaatatccagaagtggtgaggatgatattactcccagggggtgtacaccccacctatgatattgtttctaatatccaggggaaaagagtgtgatattatgcccaatatcgcagagggtgtacacttatcctgggatattgtttctagtatttggggagggaggagaggatgctattattctcaatatcgcagaaattgtacacccccgctgtgatattcttcataataatcagggaaaaagaggatgatattactaccaatattgcagggggttacacttcccctttggtagtgttcctaatatccaggaagaaagaggatgatattaatcccattttccaggaagtgtacacccaccgtgtcatgttgttcctaatatccagcagggaagaggatgatattactcccaatatcggagagggtgtacacttcccctgttatattgtttctaatacccagggggaagaaggatgacattactgccaatatcacagggtgtgtaccccaccctgctattgttcctaatattcaaaaggaaagatgaaaatattactcccaatatctcagggtgtgtacacctctcctgtgatatcgttcctaatatccacaggaagagagaatattactctcaatattgcaggggggtgtacacccccctgtgatattgttccaaatattcgggcggggagaggatgatattagtcccaatatcgcagggggtgtgcaccaacctgtgatattgttcctaatatccatgcgggggaggacgatatcactctcaatgtcgcaggaagtgtacacctctcttgttatatttttcttaatatccaggagggaaaagatgatattactgccaatatcgcagggtgtgtccaccccccttttatattgttcctaatatccaatggaaaagaggatgacattgctctccatatcccagaaggtgtacaacgcccctgtaatattgttcctaatattttgggggaagagaggatgatataacttataatatcacaggaggtgtacaccacccctatgtattgttcctaatatcctttaagggagaggatgatattactcccaatatctcaggtggtgcctattccccctgtgatattgtttttaatatccaggggaagagagtatgatattacgcccaatatcgcagggggcatacaccctctctgagatattgttcataatatatagagggagagaggatgatattacttccaatatcagaggtggggtacaccccccggttatattattcttgatatccaggaggggagaggttgatattactggatatatagcagggagtgttcacatcttctgtgatactgttcctaatatccagaaaagtagaggatgatattactcccaatatcgcagaacgtgtacacctccctgtgatattgatcctaacattcaaaggggagaggatgatattactcaaaacatcacagggcatgtacactcccctgtgatattgttcctagtatccagaagggagcaagataatattactttcaatatcgcagggggtgtacacccctctttggtatgtttcctaatatccagaaggaaagagggtgctattactttccatattgcaaggggtgtacacccccctgtggtatggttcataatatccagggagggaaagggtgctattattccccatatcgcgaggcatgtacaccctgctgcggtacggttcctaatatccagggggaaagaggatgctattacttcccatatcgcggggtgtgtacacccccgtgtggtatgttttgtaatctccgggaacgaagagggtgttattacccctcatatcgctggaaatgtacactcccctgtggtacggttcacaatatccaggggattgagggtgctattactccccatatcgcggggggagtgcacctccctgtggtatggttcgaaatatccagggtaagagagggtgctattattccccattttgcaggaggcgtacacccctctatggtatgttttgtaatatcccaggtaaggggtgctattgagagaagagagcaaaagaccccccccatattgttctgtattattttatactcagtacctgttttaagaagaaacaaggaagcgaaaccaaaggcaggcagcccggcgccaggcaccagatccaaaaccagacccgaaaccaggcctgggccttcctgaccttagcctgaaagttaaaattcaacccatgacctagcaactgatgttatccatagattccagacattgtatggaaggacattgtgaaatttcttgttctgttctgtttcactctgagtactggtgcatgcagcccttgtcacatacccactagattgctcaatcaatcatggccctttcatgtaaaaaccttagtgttgtgagcccttaaaaaggacagaaattgtgcactcaacaagcttggattttgatactctagtctgctgatgcttccagctgattaaaagccacttccttcactacctcggtgtctgtgggattttgtccgcggctcctcctgctacactgtgactccccttatagagaggggtgtacacccccctttggttcctaatatccagcgggggagtaggtgctattactccccatattgcggggagtgtacacccccttgtagtacggatcgtaaaatcaaggagggagagaaggtgtaattatccccatatcacagggagtgtacacccctttgtggtatagtttgtaatatccacgacgggagagaatgctattactccccatatcgtggagggtgtacaccgccctgtagtatggttcgtaatatccggaaggggagaggttgctattactccccatatggtgggaagtgtacacccccatgtgatatggttcataatatccaggggggtagaggatgatattacccacaatatcatagaaggtgcacacccttttgtgatattgtccataaaatccagaaggggagaggatgatattacttccaatatcacagggggtgtgtagccccatatgatattgtttgtaatatcaaggtagggagaggatgctattccttacaatagctcaaggggtgtaaccttcttgtgatattgtttgtaatatccagaaggggagaagataatttttttattttaaaagtaaactttaatgtcaaaaatgcaaacttgagaagggcagaaagatcaaacagaaggctgccacttcacaattggagggttgcacagtggccgggcagaggcgctcctcactccccagacggtgaggcagccgggcagaggtgctcctcacttccgagatgttgcaggagccgggcagaggtgctcctcacttcccagaacagggggctgccgggcagaggtgctcctcactgcccagacggtttgcaggcctggcagaggcactcctcacttcccaaacggagcagcggcaagccagaggcgctccacacttcccagatggtggggcagccgggcagaggcgatcctcacttctcagagggtagggcggcccagcagaggcgctcctcacttcccacatggtggggcggcaggctagaggcgatcctcacttcccagacggtggtgtggccatgcagaggtgctcctcacttcccagatggtgtggccgccgagctgaggcactcctcacttccctgacagtggggcggctgggcagaggcgctcctcacttcccagacacttggactccgggcagagactctcctcatttcccagatggtggggctgccgggcagaggcgctcctcacttcccagacggttcagaggccgggcagaggcgctctggggagaggataatgttactcccaatatcgcagggggtgcacactccctgtgatattgttccgaatatccagagggggaaaggatgatatagctcccaaaatcgtggggagtgtacacccccctgtgatcttgtttgtaataccaagaagaaaagagaatgctattatttccaatatagcagggggagtacaaccccctgtgatattgttcgtaatatctagggggagagaaaattatattagtcttaatatctcaggggacgttcatccccctgtaatattgttggtaatattcagaatggagaagatgatattgttcttaaaatacaggaaaaaatatgataatattacttccaatatcgaagggggtgtacactctcctgtgatattgttcccaatatccagaatgaaagaggatgctattactcccaatatcccagggagtgtacacccctttgccatattgttcataatatccaggggaagacaggataacattactcccaatatcaccgggggtgtccacccactagtgatatttattgttcatcatatccagaaaaggagaggatgatattactcccaatattgcaggtggtgtacggtccctgtgatattctttgaaatatctagaaaaggagaggatgatatcactccgagtatcacagggggtgtacacccccctgtgatattgttcgtaatatccaggggagaaaaggatgatataattgccaatatttcaggggatgtgcacctccctgtgatattgtttgtaatatccaggggtggagaggatgatattactcaaaataacgtaaacatcctgtgtgtacatcccctgtgatattgtttataatatccaggggggtagaagatgacattacccccaatatcacagagtgtacacacccctgggatactgttcataatatccaggcgggaaagaatgaactacttccaatatcgcaggatatgtacacccccctgtgatatatttcctaatatttatgtgggtaaggatattacccccaatatcacagaaggtgtacatcctctttgtgatattattcctaacatccaggaaaggagagaatgatattactcccagtatcgcagggggtgtacaccacccctgtgatattgttgctaatatccagggggagaggataatattactcccaaaatcacaggggacgtacactcctcctgagatattgttcctaatattcatggggaaaagaatgctactactccaaatacagcagagggtgtacaccatccccgtgatattgttttttatatccaaagggtgaaaggctgatattactcccaatatcgcagggggtgtacaggccccccatgatatcattcttaatatccagggaggcaaagaatgatgttactcccaatattgcaggctgtatacaccccccgtgatattgttcctaatatccagagtaagagaggatgacattgctcccaatattgcaggggttgcacgcacgccctgtgataatattactcccaatatcaacagtgggtgtacactcctcctgtgatattgtttgttatatctaagaaagaagaggatgatattactgtcaatatcacagaaggtgtacagccccttgtgatgttgtttctaatatccagcggtgagaggatggtattactcgcaatattgtagggggtgtccaacggccctgtgatattgtttctcatattcaaaaaggaaaagaataatataactccaaatatcgcagggtgtgtacacttccctgtgatattgatcctaatatccaggaagagagaggatgatattaatcccaatatcacagggggtgtacatcgcttctgtgatattcttcctaatatccagggggggaggggatgctattactcttaaaatcgcagggaacttacactcccactatgatatttttcctaatatccaggaagggagaaaatgatattactcctaatatcacatatcacaatgggtgtacatctccccgtgatattgtttctaatatcaaggatgggagaaaattatattactctcaatatcgcagggggtgtgcacacctcctgtgatattgttcctagtatccagcggaggagatgatattactttaaatattgtagaaggtgtacaacccccctttgatattgttcctaatatccagggggaaaggagatgatattactcctaatatcgcaggggctgtacaaccctatgtgatattgtttcttctaatatccaggggtggagaagataatattactcctaaaatcgaaggggacatacactccccctgtgatatttttcctaatatccagaaggaaagaggatgatattactcctaatattacaagaaatgtatacctgtcctgtgatattgttcctaatatccagaggggtaaatgattatattactcccaatatcgcaggggtgtacaccttccctgagatattgtttctaatatgcagtggaggagaggatggtattactcccaacatcacaggagatgtaaactccccttgtgatattcttcctaatgttcaggacgaaggagggtaatattactcactgtattgcagcagggggtgtagagccccctgtgatattgtttttaatattcaaggttggagaaaataatattccttccaatatcgcatggggtgtacacccttctttttatatagtttctaatatctggggggagaggatgatattactcccaatatcgcagggggattacacccccactgtgatattgtttttaatatccagggtgggagaggataatattactccaaatatcccagggctatacaccctccgtgtgatattgtttctaatatccagaggaagagaagatgatattactcccaatgtcacagggtgtgtacaggccttctttgatattgttcttaatatccatgagggagaggatgatattactcccaatatcgcaaagactgtacaccctttctgtgatattgcttccaatatccagggagggagaggatattacactcaggatcacagggggtgtacaccccaacctgtgatattgtttctaatatctagggaaaatgagggtgatattactatcaatatcacaggaggtgtacactcccttatgatattgttcctaatatccaggagaatgacaggataatattactcccaatatcgcgggtggtgtctccccccactccgtgatattgttcctaatacccagagggggagagaatcatattactcccaatatcgcaggggatgtacacctacatccggcggagtagaagataatattactcacaatatcgcaagaagtgttcaccttccctgttatattgttgctaatatccagggagtgagaagatgatattactttcaatactgagcgtgtacactacccctgtgatattgtttctcatatccagtagaggagaaaatcatgttactcccaatattgcaggggtgaacacctcctttgtgatatttttcctaatatcaggaaagggagagtatgatattacccttaatattgacaggggtgtacacccccctttgatattgttccaatatccaggggggcagaggataatattattcccaatatcgcagagggtgtacaccccccgtgatattgttcctaatatccagagaaataaaaaatagtattatttccaatatcacagggcgtacattttccctgtaattttgttcctaatatctggggggtggggtggcaggataatattactctcaatattggagagggtgtacacccccctgtgatattgttcctaatattcagggtgggagagaatgatgttactcccaatatctcaggagtcgtatacacccccttgtgatattttttctaatatccaggaggcagaggatgatattgctcccaatatcgcagggggtatacacccgagctgtgatattgtttctaatatgcaatatgggggaaggatgattttactttcaatatcgcagggaatgtacactttccttgtgattttgttcctaatatccaggggtggagaagatgctattactatattactcctcatatcgcaggcggtgtacaactccctgtgatatggttcagaatatccagagtgaaaaaggagggtgacattactcccaatatcgggggggtgtacacccctttgtgatgtggttggtaatatccaggggggcagatgagggtgatatcactccccatatcgtggaaggcgtccacttttttgtgatgtggttctttatatcccgaggggagaaggtgatattactccccatatcgcgaagggcatacacccccctgtgatatagctcataatattccggagagtggaggaagatactatgccctatatcgcgggtggcctacaaccccctatggtttggcttataatatccaggggggagagggtaatattgctccccatattgtggagacgtacagccccctgtgatatggtttgtaatatctttggggggcgagggtgatattactccccatatcgcggggagcatacacccccgtgatctggttcatagtatctcaaaggaagaagttgatgtgtacaacttaagggaaaaagttgaagtgaagtgtacacacgccctgtgacgtggttcataatatccaggcgggggagaggagagtgatatttactccccatatcgcgggtgttgtaaactcccctgtgatatagttcataatatccaggggagagaggagggtgatattgctcctcatatcgcgaagggtgtacaaccccctgtgatatggttcataatatccagaagggtagaggacgatgatattactccacatatcttgggaggtgtgatatggttcgtaatatccagcgatgagagaatgatattactccccatatcgcaaaaggtgtgatagggtttgtaatatcctgagggggagagggtgatattaatccctatattgcagaaggactacaccctcccatgacatggtttgtaatatcccagggggtagagtgtgatattactttccatatcacagggggtgtgatatgattcgtaatattcgaagggggagagggtgacactactctccatatcacggggtgtgtgatatggttcttaatatcccaggggttagaggttgatattaccccctttttggggggtgtgtacaccccctgtgatatggttcgtaatatcccgggggagacagggtgacattattccccatatcgaggggatcgtacaccccctgtggtgtggttcataatatccctagggggagatggtgatattactccccatatcagggggcgtgcactcttctgtggtataattagtaatatccagggggcagaggtcgatattcgtttccatatcatgaagggagtacacttccctgtgatatggttcctaatatccaggggggagagggtgatattattccccatattgcggggggacatacaacccctgtgatatggttcataataaccagaaaagaagagggtgatattaatccccgtattgcagagggcatacaccccccctgtgatatggtttgtaatatctaggggaggaaaaggtgatattactttccatattgctgggtgcagacacccctttatgatatggttcataatatccaagttggagagggtgatattacttcccatatcatgggaggtatacccttccctgtgatatggttcgtaatatccagaaggggagagattgatattactccccatattgtggggggcgtacaccttcctgtgatacggtttgtaatatctaggggatatagtgggtgatattactcaccatatcacgggggttgtaacatggtttgtaatatccaggggaggagagggtaatgttactccccatatctcggggcatgtacaccctcctgtgacatggttcgtaatatccaggtcgggagagggtgatattactcctcatattgccgggggtgtgttatggttcataatatcctggggaaggaggctgctatcactctccacatcttgggggatgtacactctcctgtgatatggttcataatatccagggtgggtgagggtaatattactccccatatcgcgggaagtgtacatacccctgtaatattgtttgtaatagaagagagggtgatattactccccacatcgcgggtggtgcccacccccctgtgatatggtttggaatatccagggggatgaggagggtgatattactccccatatctcggtgggagtacatccctctttgatcaagttcataatatccaaaaggaaacaggagagtgatattactccccatatcgccgggggtgtacacgggagggggagtacacccccggcgatatggtctgtaatatccagggaaggagaggagggtgatattactcaccatatcgcaggtggtctacatttacctgtgaaacagtttgtaatatccagggggggaaatgagaatgattttttttttttgagtctcactgtgtcacccaggttggagtgcagtggcacgatcttggctcactgcaacccccgcctcctggactcaagcaattctcctctcccagcctcctgaatagctgggactacaggcgcaccccacaacgtctggctaatttttgtatttttattagagacggggtttcaccatattggccaggctgatctcgaactcctgaccctgtgatccatccgcctcggcctccaaaagtgctgagattacagatgtgagccaccacgcatggcccaaggagaacgatattactccccatatcccagggggtgtatatccccctgtgatatggttcagaatatccggaaggaaagacagggatattacttcccatatcgcaaggggtgtgacatggttcgtaatatcccatgggggagagggtaatattactcttcgtattgtgaagggcatacactcccctgtgatacagttcataatattccggggagtagaggaagatattatgctccatatcgcgggtggcataagccccctgtggtttggttcataatatccagggaggagagggtaatattactccccatattgtggggacgtacaccctcctgtgatatggtttgtaatatcccagaggggagagagtgatattactccccatattgcagggacatacacccccctgtgatatggttcaaaatgtcttttttttttgaaggactggttctttatttcaaaaagacacttgtcaatattcattatcaaaacagttgcactattgatttctctttctcccaatcggccccaagtagaccacatcaaaggagagtacatattaagccaataagctgtaggatgtacacctaacagacctcctagaaaccttaccagaaaatggggacagggtagggaaagaaactttaaaagatcaacaaactgccagcccacggactgcaggggctgtcacagccagatggggtggccagggtgccacaaacccaaagaagcaaagtttcaaaataatataaaatttaaaaagttttgtacataagctattcaagatttctccagcactgactgatacaaagcacaatgagatggcacttgtagagacagcagcttcaaactcagaaaagggtaatgagatgagtttcacatggctaaatcagtggcaaaaacacaatcttctttctttctttctttctttcaaggaggcaagaaaagcaattaagtgctcacctcaacataaggggaacatgatccattctgtaagcagttgggagggggtagagatggaacaaaattttggtctcagaggtcttgccatcttaatttggtcacttctaatgaaaaaaataaaaaatagaaataacattatccaaaggtatcttaaagctgaaaacttgaacagcacattttttgttgttgttgtttggctaactcctcctggaaccacctttctggcttagctagtactttgtacagagcaatgaggcttcccatagtggagtctccctgggctctgtttggctctcagcaaggcaggcctataccttttcctctcctccatggagagaggaatatgcattaaggtgaaaaatcaccttccaaaagtgagaaagggattcgatcgctgcttcagggctgtggtattatatggaatgttttacaaaaggttgctacaaaacaacaaaagaggtaattacaaaatgtgtacatcacaacatactttttaaagacattatgcattgtgctcacattcccttaaatgttgtttccaaaggtgctcagcctctagcccagctggaatctccgggaagaggcggacagtttggtgaaaaagacacagggaaggagcgggcggcggaaggagggggcggcgaaaggagaaagcagccttccagttaaagatcagccctcaattaaaggtcagcttcgggcaggctggcctcaggcggagtctggttcagagggaggagcagcagcagggtgagactgaggcgttctacatctcattcaggtcaagcagagtctggtccagcatcctttgtgtacagaggtgctcccctttggtgcatttcagtttatcttccaagtcatcaattgtcttttccagcttggctaccgatctctcagcaaactcagcatgggtctccgcctcctttattttatcagtaagaatcttgatctcttcctcatatttgtcttctttttgagagtacttttcttcagcagcactcagacacttcaggttctggtccatcagtctaatctgctcatccatctctcggcaaagggattctgccagctcagctcgttcctctgtgcgttccaagtctccttcaatgatcaccaacttacgagccacctcttcatacttcctatctgcctcttctgcaatgtgcttagcttctctgagttggatttcctggagttccatcttttcttcatcttttaaggcccggttttcaataaccttcttacctctctcactctcatcagcagctttttccgcttcttccagcttttgcagggcagtagccaggtgctcctgagcacggtccagctcctcttcaaccagctggatcccacgttcaaggaggccacctcagcctcagcctgttcccgggcccacctttctccctcaacttctcgctggaggcgctcagctcgctcctctgcatcatctgcctgctgctgcagaacctggatcttgcgcttcaccgcctcgatggtggtgatcccagccatggtgcccacccagctactgctagagctccggttcctgcctcctccgatcggcgttgcagcctcctctcacccttacttccgcctcggttcaaaatatcttaagggaaggagttgatattactccccacatcacgggaagtttacatcccctggtgatatggtttgtaatatcccagggtggatagggtgatattactctccatatcgcgaaggagtactcccccctgtgatatggttcataatatccttggggggagagtgtgatattactccccatatcgcgagggccatatactcctttgtgacatggttcgaaatatcccggtgggggagggggtagagggtaatattactccccatacagcgaagagcatacgcccttctgtggcaaggttagtaatacttcagggaaaagagtgcaatattacttttcatattgcagggaacatacactcccctgtgacatggttcgtaatatcccgggggctgagagggtgatatttctccccatatcaccgggggcctacacctgggtgtgatatggctcataatatacagggagggagagggtgatattactccacataccgagtgaggggttacacaccctcgtgacatgttcgaaataccccaaggaggagacaatgatattactttccctgtcgcgggggctacaccctcccagtgatatggttcacaatatcccggggtggagagggtgatattactccctatatcaccggggggtgtacacttccctgggaaatggtttacagtatccccggggggagagggtactattactccccatatcacgttacatatcagggtacacccccacgtgatatggtttgtaacatcccaggaggaagaaaatgatattactccccatatcgcggtggcatacacccctccccgttaaatggttcataatatcttggggtggagagggtgatattactccccatatcacgtggggcatacaccccactatgatatggttcataatatcccggaggggagagggagatattactctccatgtcgcggggggcatatacacccctgtgatatggtttgtgatatcccgggggcggagagggagatattactctccatatcgtggggtcgtacacttttctgtgatatgattcgtaatatccagacggggagagggtgatattacttcccatattgcgggggcgtacacccctctgtgatatggttcataatatcccgaagaaaagagggtgatattactcctcatatcgcggggaacacacaccaccctgtgatatggtttgtaatattcagcgggggagagagtaatattactccctgtatctcggatggcgtacactcccctgtgatatggttcataatatccagaagaaaagagggtgatattactccccatattccagggaatgtacaccaccctttgaatatggttcgtaatatccaggaggggagagggtaatattgctcccaatatcgaaggaggtgttatacggttagtaatatccagagaaggagagggtgacattactccccacatcgtggtgggtgtgcacccacctgtgatatggttcataatattcaggttaagagaggtgatattgctttccatatcgccaagggtgtacactcccgtgaaatacagttcgtaatatccaaaaggggagagggtgatattactcccatatcgtggggggtgtacacccctctgtgatatggttcataatatccagggtggaataaggtggtattactccctgtatctcggggcatgtacatcgcctgtgatatgattcataatatccagaagaagagagggtgatattaatctccatattgctgggggtgtacaaccccctgttgtatggtttgttacactgagttggggagagggttacattactctcaatatcgagtggggcatacacacttatgtgatatggttcataatatcccagggaggagagggtgatattactccccatatcgcgggaggcatacaccccaatgtgatatggtttgtaatatctacatttttttttttgagacgaagtctcgctcttgtcccccaggctggagtatgatggccggatctcggctcactgcaacctcagcctcccgggttcaagcgattctcctgccttggtcccccaagaagttgggattacaggcgcacaccaccacgcccggctactttttgtatttttagtagagaaggggtttcaccatgttggccaggctggtctagaactcctgacctcagatgatccacctgcctcggcctcccaaagtgctgggattacaggcgtgagccactgcacctggcctggtttgtaatatctatgaagggggaaggtgatattactttccatatcacgggaggcgtacaccacgatgtgatatggtttgtaatatccagggggtatactgggtgatattactccccatatcgcggggagtgtatacccttttgtgatatggttcctaatattaagctgaggagaaggtaatattactccccatatcgcaggggtttttatatggttcataatattcaggaagagagagggtgacattactctccatatcacggggtgtgtactcccccatgtgatatggtttgtaatatccagggaaggagaggttaatattactccccatatcgcagggggtgtacacctctctgtggtttgtaatatccaaagggaagaggatgatattatcttcaatatcttggggggatacagtccccagtgatattgttcataatatccagagggggaggggatgatattactcccaatattgcaggtggtgtacaaccccctgtgatattctttataatatagagggggatgatgatattactcccaatatagtaaacaacctgtgtgtacaccccctgtgatattgtttataatatccaagggtggaaaggatgatattactcctcatatcgcagggggtgtatacccctctgtgacattgttcctaatattcaggggaggagaagatgatactactcctcatatcacaggggatgtacacccccctgtgatacttttggtaatatccaggggaggagaaaattatattattccccatgtcacagagggtgtacaccccgctgtgatagtgttcataatatccaggtgaaaagaggatgatattactccgaatatctcaggaagtgtacacccttctgtgatattgttcataatatccaaaggtggagaggaggatactactccccatatcgcagtgggtgtacacccccctgtgatatggttcataatatccaatgtaggagaggatgatattactttccatatcgcggagagtgtacatccccctgttatattgtttgtaatattcagggagaaagaggatactactactccccatatcacacggggtgtatattcccctgtgatatggttcctgatatccaagagatattataatcctctcttggattatgctacctctcatatcgcatggggtgtacacacactttgtgatatcgtttgtcatatccaaggagggagaggattatattaatcccaagatcacggggggtgtacaccctcctgtgatattgtttgtaatattaaggggggagaggataatattactcccaatataattaacaccctgtgtgtactcctccttgtaatattgttcataatatccaatgggggagacgatgatattactttcaatatcgcagaggatgtacatccctttgtaacaatgtttgtaatataaaaggcaagagaggatgatactacttccaaaattgcaggacatgtacaccccccggtgatattgttcctaatatccagtggggaagaggatgatagtagtcccaatatcgcaaagggtgtacacaccccctgggatattgttcctaatataaaaggaggagaggatgctattattcccaatatcacagaaggtgtaaaatcccctgtgatattgttcgtaatattcaggaggggagaggattatattactcccaatatcacagggtgtgtacacagggaggggcaagggccagaagcgggcgggaatccccatgtttgggcggacccagtttctaatggccagcatttgccaatcaaagcttaccagagaactctaaaagccagggctttcctgctagacaagactcatttctggaactgctttaaaaagaaacaaaacttcccaaggaccccttttcctctctgtctgcctaaaataatgttttaaaaactcctaaagcagctgaattcagcccccttcctgggggaatgtatagacggaactcccacctttcccggcatcccaaggccagagtatgtgaaactcctgggtctctatgtgtgtctgagcggctgctctgccaacactccacacagccctgtgtcctggacccaaggcccttatgacctgagctcaagaggggatctcctgatccatgggttgcaaagatccatgggagaagcatggtttctggggcggggtcacacgctcagtcactgtttccctcggatgccggagatggttcctttggctctctgccaatacagggtgaatcatcatccatccctcttttctttgttctcccgggtcaagttgtttgcctagtcagtcccaatgtgagaacctgaatatttcagttgacgcgctgacttcaaaatccccgggcttcgggaggcggagcttgcagtgagccgagatcccgccactgcactccagcctgggcgacagagcgagactccgtctcaaaaaaaaaaaaaaaaaaaaaaaaaaaaaagtccccgggcttttcttttcactcagtggaaggcagctgcttctaattggccatcttggcccgcccccaccacgtgaccttctgtaaaatgcctccactctccaggaacgctctcattatataactttgcctgaaaccaacagcacgctcattgcacatatcatgggctcatttatttcacttataaagaacctggccaaggaagagatagtgcctaaagtggccagtattctgaccgatatgttagaaaaatggtgtgccgaccaattcatgacatgtgtcccaaaactagcaacggaaattgtattcgccgtgttgaggtctctaatccagatgatgctcatctatgtactggaaaaggcagagtcctttcctgacaagctgctgaaactcttcagaaacatctcatatttcctgaagaagatgatgtctggacaagcagcacaggtcgttcagatttaactttctattcatatatccagcacgatattcgcacaattgtcacgaaaccttaccagttgatgagtcctgcacatttcctttaatttcaggaggaagagggtaatccggatgagttttctgacctactctgctgctgtgattaaacaaccaccaggaaattttgacgacactgttctcctgagctcctccctttcctccgggaacaaaacaattgaatttacaaaaataaagtgttatttgactggagtgaggtctcatgtctgcttatgcggtggctcgctgctcagaacagggtgagtctctgggttgtgtgctgaggaggggaggctctcaatctggagaaaacccactgcaggggacacctccatggggtctgagggactgaggatgaggagccggactgggtctagggaaggaggaggtttcagagggtgaaattctggcactaaagcctgggggtgtttgggaacttcctccttccgaagaagtttcagggagggataaagacaaaccctgggctccttgaggggcccttactaatttgagaggactctatcgggaaggagagtgacaatggcctccttgaggactgaggcccctgaataaatgaggcccagatacagtccatgggggatgagaccttcaagggtcacattttggttgggacagaggaaaagtgcagctctgcagccgcagaggaaaacccggcagtgtgaaagcgaccttggaggggccctgtgcgctctgaatgcgtctgagcccccatcccctgtccccgcctctctttctggattcttccagctcggctgtctccgccatcttctgagcgctccaccctgacttattcaagtttcccttctgccttccaagtactccaaaatctttcagatctgtgtccctacccctgtttttagcatgtgttggggctccaggtccctgaaggtttctggcctgaaatccacctccccagcggagtggactgcgttctagagactccacactccgcgaggttcccaggcccctgagggacaaccgagtggcctgcgcacttcagggctccacactcggcaaggtctttcaagcccttggggtccccttcttagttttttccacctttctgggctgcagtcactccataaatgctgggatctgatccccacccccactctcgtttcctcaattctgcgggctacacgctctggcaaggtcctccgggccctggatcccctccctctccctatgcccacgctcctagtcagcccttctggggtccactattttcaggaactaaccgttctcatggagccttgctaaccggaaagctgtgtggaagaaaggctttgaggatagaggtggagatttggctcttccatagtgccactcacccaccccaccatgctgccactgccagacccggacccctgtttcagaacaagtgaccagattcgctcctggacagccctggacactggccttttctctgaaaactactcaccctttctctagtccccacttcatgccagcctcataccctcttccttcccccacgctggcttccgggatcctcctctgctcagacaacctcttctgtgtcccacccccgtttttagaatgctttggggcaccaggttgggggaaggtttctggcctgatatccatctctttccaaactcccttcttcccttgaaaggcttcttgccttcagccccacttctggctccgaggtttcaggacaccctcctcttcatcctcattcttttgaccaccagctttttaggaattcgaacgtccctctcatcttcgtgaatcctgtccaggcatttgttgaccccttcatctgatacccctgacctcacattgccaaaagtctacccctacccagtacactggaattagacaaaatcccaggagttttacctcaactctgagtgtgcccacaggagctctccctgaagccacgtccttttaagcagggtctagggttcctcccttgtcttaatgaactctttgtcacacggaggacgttatggagcccttatgatctttcactgcctttctgcccagcgttttgtctttccatggacatttataatattttccatggacattttgttctctcaatgtccacccctaatttccaacatcccaaagattctcatgtgtttcctgaaagccatttacaggaatggctgtgcccagacccccttccccaggatcctccttcacacctggtaggtgcctctcctagagagatttgcactcagttgtcgtgcagtcacatggcccagatggttgttaatcacccccttcctggcaacagctagcagccagggaatcactggcacagaaacctcagggtgaccaagatgaggccacctctgtgctgaaggctgtgctccagagcctgcttgggatcaggcttaagcaggtcttcagccagacctgatgttacctggtttccttgagctgccctgcctgagctatcgggagcactccctcaatgcacatcttgattccctatctcatgctctgcttctagaaaccatgagctatcaattgctactggcaatggtcctgggaagtcaaccctaagtatggattctggggttggatgactccccacaggacttcagtgagcaacaatcactgctggcagttggaggacagagtcgctagggcatgtgaccactgtgaaaccaccgatgtttcacctggggtaattttggatgaactacggtagaagcactgaaggtacattgcttttggtttggaagattgtaggtaaataatagcgatatgaatgtggaattggatggctgcaaacgagtgccattgatgcattgaaagaggaaaagtcaggctgtcacctgtcactcagcaatttaaagtgtgagagttgggactagatgtggtggctcacatctataatccagagattcgggggaagcttgaagaggtaggatcttttgagtccaggagttccagaccagcctggacaccagagcaagacctcatctctacaacaaaattttcttaaaaattagatgggcttggtggcacgcacctgtacttgtagatctagctaatggggagcatgagataaaaaaatcacctgagtcagggacttaggggttacaatgaggtatgattgtgccagtgcacacactcccacctggccaacagagtgagattctgcttccaaaaaaataagaaataaatcaggtttgagagttggaaagcatcatcttctcctagagccaaaggacatgtacaactgagacccaggaacaaagcttcatcacaaagagaccatcatcagtggagccgggagatgcattccccctcaccctgccttgaggaggcagtggagtcatctgtctgggatcctttctgacccagccctatttgtttgtctctttggcttctttggatttgtatattttagctgttataacactgtaaaacaaacagagtgatttttttgagttgtgtgaatgatgctagctccatagtcaccctgagagtgatgggaacttttgaatttgtggcaagttggagggtagtgtaagtgacctgagattgccaaattggggctagcactggatgtgaggttaggctagtggaaaaatatgcccagaaccagaggagtgtgggctcactgcaggtggttaggctcagatccaaattgtacagatggatagctttggggtaaagaataacatagttgagaagtgcatgtgttagtctgttcatgcactgctataaagaattacctgagactgggtaattatttataaaactcaggtttaattgggtcatggttccacaggctgtacaaaaagtatgatgctggccatcagctcaacttctggggaggccccagaatagttagagtcatggcaaaaagtacaagggaagcaggctcatcttccacggccagagctggagcaagtggtaggagaggtgatacacactttcaaacaagtaggtcttttgagaactccatcaccggacagcacctatgggatggtgctaaattattcatgaaatatccgcctccataatccactcaactgtcaccagcgcagccagccccacctccaacagtggggattacaattccatatgaggtgtgggtggggacacagctccaacctcaatcagtgggcatcctggattgggtctactatagaaggagaaccaggagctgactatgatcttgaaccctacccatgatggccgggcggggtgactcatgcctgtaaccccagcactttgggaggctgaggtgggtggatcgcctgaagtcaggagttagagaccagcctggccaacatggtgaaaacctgtctctactaaaaatacaaaaaattagaccggcgttgtgctggatgcctgtaatcacaccactacgctccagcatgggaaaaaataccaaaacttcgtctcaaaaaaaaaaaaaaaaaaaaaaaaaaaaagactgcccatgaccactgcaccagtgagagggacaccagcatcactgagatgcaagggctggacattcttcataggtcagagctcaaagcaggggacactgatacagagatgggctccatccatagcaccaaagtggtgagaggatgtgggaatggcagaggccagcactttgccatcaatgcaagggggtataaggaggtgacaccagtgccagagtacatcacggggggactgccctacaatatctaggacttacctcttagagcgtgtttcattagcgacaacagatataaatggcagacaggtgtgtccctgcattaacaggaaatagaaatcatcaagaggaacagaaggcagatgtcagcagccccttagaaagtcatcatccttcatacagttaaaatctgagacagttctcacacgagaaggcctaactcaaaaagaggctgggttctcatgaggcaggtttatgcaaaaccaaggaaggtgtacaagtttggaattctccagtttcccttggaaaagacctacagtcatttgcttaggtaactgagcactgaacaaaggtgagtattgttgtcttttagaagctcttggccaagaaggccttgttggcataaaacccatggtttggaaacatcaccatgacccctgttagagtaatggcctaagggtgggggtcaggaaattgatgtattccttgccaacttctgcctctaagtgagtgaactctgtttgtgaacctctctcctctgtggttatgttcctaggctctcatgtataatcaggagtcatagacttagaaacaggaaaaatacttacagtgtttttgtggcctgtgagctatgacttataattttaggaaaaaaacaattgcaaatggaaagcctaagtctatcaatgctcatccaagacaacataatcaataaaaaccaatatcaaatctcaaggcaaattatttcctgtatatagatggcagagatgagcaccaccatcaaaaactcaaggaccagtgctgtgggtccagtcatctgtttcatggaattcaccagtctggtatcttcaaaatccagaaggatgatggcagatggcaggaaagtaatgcaaacgtcatcaggtgtgaccccactgtagcagctgtgatggatgttttctctcaccatagcaataaataacacaacctcggtcacactgtatgcattgttggtctgcaaaatccatgttttgcaaaactcttcaggaaggtggatctgtaatattggcattgacatgagaacaacagcagtatttattcacaatctcaagctctctgtcttcccgtctctctcattagccatccaagtagtcctgaggaaccaagcccatcagaacattctgcaacataatacacagctccattctccattcaaattttgttgttgttgttgttgttgatgagacaacatcttactccatcagccaggctgacgtacagtggggctatctgggctgactgtagtcttgagcttccaggctcaaggcatcctctcacctcagcctcctaagtggcttgaactacagacacacagcgacatgctgggctagtttttgtatattttgtagagacgtgctctcaccatgttattcaggctggactcaaactcctgagcgtaagtgatccaagcaccttggcctcaaagtgctgagattacaagcctgagccactgcacccagcccaatctccattctactgataacaatgtcattaccaggtctgatggacaggaaatggtaaggtttctgaaaacctaaggatcacacagcgagttccaaaggctgaaagtgcatacctgtcgacactgataccaatgacatccaatggtgagaatgacattccttgtagtcctagctctgctcataacaaatctatactgaagtgtaagagtttgatggtcatggggattttccatgtctctgcctttcagcgatgtgccatatctgtgaagtgttcagaaatgcaacagcctgaggcatgctgggcatatcctctaataaaaaggaaaatgccattttatggtcctgtatttctacaagttggaacacatgggcctgtgatccagatgggggaaatgggaatattcccactcattcaccttcatccacgaagcccatttgaaagctttgggcttcccatccttgtagattttagtgttgtgggctgggtgcagtggctttcacctgtactgccaacactttgggaggcctagacaggtgaatccactgaggccaaaagttcgagaccagcctggccaagatggtgaaaccccgtccctactaaaaatacaaaaattagcaaggtattggggccagcacctgtaatcccagctgctcgggaggctgaggctggagaatcgcttgaacccaaaaggcagagactgcagtgacccgatcctgcctttgcactccacctgggcaagcagaacaaaacttctgtcttgaaaaaaaaaacaaaaaacgaacaaaaaagatgttagagttctgggtttagaggtctataccccagaaagagaatggtttcaacaagggacaaagaagttgctttaaacgttgacttgccatttcttttcagtgtgtttgttctcttgcgtcaagagaccaccagaaaagtggtgcaattactctcctgtcaagaatcattgactatcatctgcaagagggtcagatcctggtatataattagggcagaaatacttagtctgagaagggtatgacatccagaggccctattaatgatgtccttttctccatgcctgactctgaccccatgtgctggactgcccctgtgtggatggcctcatggcctgctcggactctgaggtcccaccccaagtggcacctccatggagggctctactcttgtatgggctctgacactcacactgagacactctcccatggacacctcttcacccacttggggtctgaaactgggctactccatccctccctaacctggaacagagagctttcactgctattacacaagtcatagaggctaactcctcatttttccaagctaattattgaaacattagtcctgggttgataagacaagataagttaacttttcataaatttgcttatcaagttttgaataaattcaaataaattcaccttccccacacaccttagttgtcgacatcacacgcgcacccatactcacagggtgagcacgaaggcttcactgtcagtggagaaagtggcaaaacccttctgtgcctcatcctggtctagacctggccctcatcctttcccactcttcccctcactcccttggattcatccacactggcctcctgcctgctgctccacctccctgcgaagctcacccctgcctcagggcctttgcacgtgcagtggcttcaagccatatcctcttcacccagatctcccagatctcctgaatgatcttcttttatcattcaggtctcagcttgcatgtaatcttctcagtgaggattacccaaaccacatagttcattcattcattcaaatattcattcaatggcatattgacaaagcagctacttcatgccaggccttgggccaggtgttatggatatggcaacaaacaaaacaagagttttctgctctcaaatttttacccacttaaaggagatatcatacatcatctgtaaataaatacatcatctgtaaataatgatgtaaataaatacatcatctgtaaatctgtaaataatgatgtaaataaatacatcatctgtaaataaataaagtataataaaagaaaatagtaggtttttttggttggaggtgaccgtgaagtttgcaaataccatcttacaacacattattttattttatttcatttcatttttaattttattattattatactttaagttttagggtacatgtgcacaacgtgcagatttgttacatatgtatacatgtgtgaagttggtgtgctgcacccattaactcgtcatttagcattaggtatatctcctaatgctatccttcccccctcccccaccccacaacagtccccggtgtgtgatgttccccttcctgtgtccatgtgttctcattgttcagttcccccctatgagtgagaacatgcggtatttggttttttgtccttgtgatagtttgctgagaatgatggtttccagcttcatccatgtccctacaaaggacacgaactcatcattttttatggctgcatagtattccatggtgtatatgtgccacattttcttcatccagtctatcattgttggatatttgggttggttccaagtctttgctattgtgaagagtgccgcaataaacatacgtgtgcgtgtgtctttatagcagcatgatttataatcctttgggtatatacccagtaatgggatggctgggtcaaatggtatttctagctctagatcactgaggaatcgccacactgacttccacagtggttgaactagtttacagtcccaccaacagtgtaaaagtgttcctatttctccacatcctctccagcacctgttgtttcctgactttttaatgatcgccattctaactggtgtgagatggtatctcactgtggctttgatttgcatttctctgatggccagtgatgatgagcatttcttcatgtgttttttggctgcataaatgtcttcttttgagaaatgtctgttcatatccttcacccactttttgatggggttgtttgtttttttcttgtaaatttgtttgagttcattgtagattctggatattagccctttgtcagatgagtaggttgtgaaaattttctcccattctgcaggttacctgttcactctgatggtagtttcttttgctgtgcagaagctctttagtttaattagatcccatttgtcaattttggcttttgttgccattgcttttggtgttttagacatgaagtccttgcccgtgcctatgacctgaatggaaatgcctgggttttcttctagggtttttatggtttgaggtctaacatgtaagtctttaatccatcttgaattaatttttgtataaggtgtaaggaagggatccagtttcacctttctacatatggctagcctgttttcccagaaccatttattaaatagggaatcctttccccacttcttgtttttgtcaggtgtgtcaaagatcagatagttgtagatatgtgacattatttctgaggactctgttctgttgcattggtctatatctctgttttggtaccagtaccatgctgttttggttactgtagccttgtagtatagtttgaagtcaggtagcatgatgcctccagctttgctcttttggcttaggattgactttgcaatgcggggtcttttttggttccatgtgaactttaaagtagttttttccaattctgtgaagaaagtcattggtagcttgatggggatggcattgaatctataaattaccttgggcagtatggccattttcacgatattgattcttcctacccatgagcatggaatgttcttccatttgtttgtatcctcttttatttcattgagcagtggttttagttctccttgaagaggtccttcacatcccttgtaagttgggttcctaggtattttattccctttgaagcaattgtgaatgggagttcactcatgatttggctctctgtttgtctgttattggtgtataagaatgcttgtgatttttgtacattgattttgtatcctgagactttgctgaagttgcttatcagcttaaggagattttgggctgagacaatgggttttctagatatacaatcatgtcgtctgcaaacagggacaatttgacttcctcttttcctaattgaataccctttatttccttctcctgcctaattgccctggccagaacttccaacactatgttgaataggagtggtgagagagggcatccctgtcttgtgccagttttcaaagggaatgcttccagtttttgcccattcagtatgatattggctgtgggtttgtcatagatagctcttattattttgagatatgtcccatcaatacctaattattgagagttttcagcatgaagggttgttgaattttgtcaaaggccttttctgcatctattgagataatcatgtggtttttgtctttgggtctgtttatatgctggattacatttattgatttgcatatattgaaccagccttgcatcccagggatgaagcccacttgatcatggtggataagctttttgatgtgctgctggattcggtttgccagtattttactgaggacttttgcatcaatgttcatcaaggatattggtctaaaattctcttttttggttgtgtctctgcctggctttggtatcaggatgatgctggcctcataaaatgagttagggaggattccctctttttctattgattggaatagtttcaggaggaatggtaccagttcctccttgtacctctggtagaattgggctgtgaatccatctggtcctggactgtttttggttggtaagctattgattattgccacaatttcagatcctgttattgctctattcagagattcaacttcttcctggtttagtcttgggaaggtgtatgtgtccaggaatttatccatttcttctagattttctagtttatttgcgtagaggtgtttgtagtattctctgatggtagtttgtatttctgtgggatcagtggtgatatcacctttatcattttttattgcatctatttgattcttctctctttttttctttattagtcttgctaccggtctatcaattttgttgatccttttaaaaaaccagctcctggattcattaattttttgaagggttttttgtgtctctatttccttcagttctgctctgattttagttatttcttgccttctgctagcttttgaatgtgtttgctcttgcttttctagttcttttaattgtgatgttagggtgtcaattttggatctttcctgctttctcttgtgggcatttagtgttataaatttccctctacacactgctttgaatgtgtcccagagattgtggtatgttgtgtcttttttctcgttggtttcaaagaacatctttatttctgccttcattttgttatgtacccagtagtcattcaggagcaggttgttcagtttccatgtagttgagcggttttgagtgagtttcttaatcctgagttctagtttgattgcactgtggtctgagagacagtttgttataatttctgttcttttacatttgctgaggagagctttacttccaagtatgtggtcaattttggaataggtgtggtgtgatgctgaaaaaaatgtatattctgttgatttggggtggagagttctgtagatgtctattaggtccgcttggtgcagagctgagttcaaatcctgggtatccttgttaactttctgtctcattgatctgtctaatgttgacagtggggtgttaaagtctcccattattattgtgtgggagtctaagtctctttgtaggtcactcaggacttgctttatgaatctgggtgctcctgtattgggtgcatatatatttaggatagttagctcttcttgttgaattgatccctttaccattatgtaatggccttttttgtctcttacgatatttgttggtttaaagcctgttttatcagagactaggattgcaacacctgcctttttttgttttccattttcttggtagatcttcctccatccctttattttgagcttatgtgtgtctctgcacgtgagatgggtttcctgaatacagcacactgatgggtcttgactctttatccaatttgccagtctgtgtcttttaattggagcatttagcccatttacatttaaggttaatattgttatgtgtgaatttgatcctgtcgttatgatgttagctggttattttgctcattggttgatgcggtttcttcctagccttgatggtctttacaatttggcatgtttttgcagtggctggtactgactgttcctttccatgtttagcgcttccttcaggagctcttttagggcaggtctggtggtgacaaaatccctcagcatttgcttgtctgtaaaggattttatttctccttcacttatgaagcttagtttggctggatatgaaattctgggttgaaaattcttttctttaagaatgttgaatattggcccccactgtcttctggcttctagagtttctgccaagagatcagccgttagtctgatgggcttccctttgtgggtaacccgacctttctctctggctgcccttaacattttttccttcatttcaactttggtgaatctgacaattatgtgtcttggagttgctcttcttgaggagtatctttgtggcattctctgtatttcctgaatttgaatgttggcctgccttgctaggttgcagaagttctcctgggtaatatcctgaagagtgttttccagcttggttccattctccccatcactttcaggtacactaatcaaacgtagatttaatcttttcacatagttccatatttcttggaggctttgtttgtttctttttactctctttcctctaaacttctcttctcacttcatttcattaatttgatcttcattcacttatatactttcttccacttcatcaaatcggctactgaaggtattgcatgcatcatgtagttctcatgccatggttttcagctctatcaggtcatttaaggtcttctgtacattgttttctctacttagccattcgtctaatcttttttcaaggtttttagcttccttgtgatgggtttgaacatcccctttagctcagagatgtttgttattactgaccttctgaagcctgcttctgtcaacttgtcaaagtcattctccatccagctttgttccattgctggtgaggagctgcgatcctttggaggagaagaggtgctctggtttatagaattttcagcttttctgctctggtttctccccatctttgtggttttatctacctttggtctttgataatggtgacctagagatggggttttggtgtggatgtcctttttgttgatgttgatgctgttcctttctgtttgttagttttccttcgaacagtcaggttcctcagctgcaggtctgttggagtttgccggaggtccactccagaccctgtttgcctgggtatcaccagcggaggctgcagaatagcaaatattgcacaacagcaaatattgctgcctgatccttcctctggaagcttcgtctcaaaggggtgcctggctgtatgaggtgtcagttggcccctactgggaggtgtctcccagttaggctagatgggggttagggacccacttgagaaggcagcctgtccattcacagagctcaaacactatgctaggagagccactgctctcttcagtgctgtcagatggggatgtttaagtctgcagaaatttctgctgccttttattcagctatgccctgcccctacagatggagtctacagaggcaggcaggcctcattgagctgcggtgggctcctcccagttcgagcttccagaccactttgtttacctactgaagcctcagaaatggtgaacacccctcccccacccagtctgccgccttgcagttccatctcagactgctgtgctagcagtgagcgaggctccatgggcgtgggacccactgagccaggcacaggatataatctcctggtgtgccatttgctaagaccattggaaaagcacagtattaaggtgggagtgtcccaattttcccagtacagtctgtcacgggttccctcatctaggaaaggtaaatcccctaaccccttgtgcttcccggtgacgcaatgccccaccctgcttcagctagccctccatgggctgcatccactgtccaaccagcccaatgagatgaacaaggtacctcagttggaaatgcagaaatcacccatcttctgtgtggatcaggctgggagctgcagaccggagttgctcctattcggccatcttggaatggcaatctatgtttgctttttacatttgaaaaaactggtgtcacgtacctaggtattaatcattgtggtatcctcttgccgatttacctctttatcattaactagtgaccctccttgtcttttgttgttacagtctgtgattttagtctattttatctaatatgagaatagctactctggcacttttttggtttccagcttcatgaaatatccttttccatttccctgttttcatttccctttcggtgtctctatagatgaagttgatttctttaaggcaccataagttgggtcttatttctttatccatttgaccatttagagaatttagaacactgtcagtgttattattcataagtaaaaacttaagagtgggtgtagtggtgtacatctgtatttcctgcactttgagagactgaggcgagctgatctcctggggtcaggagtttgagaccggcctggtcaacatgatgaaaccctgtctctactaaaaatacaaaaattagccaagcatgctggcatgtgcctgtaatccaatttacttgggaggctgaggcaggagaagcttgaacctgggagacaaatgttgcagtgagctgagatcacacagagaagtcatctccactctcctcatcagaacctcttgttcacagcatttgtgagcacaaatcaatgatggttattctttcctactaattagggatattttattacacagcaatagcctccagcaaagggaaccatcatacatgattcctacaagttgacagggctggaattatcactgaaaaactaaggtggctatacttgattcccaatgtccaatttttcatgaatagagaaatttatcctttttccccccagccagaaaccaagttttgctcttacgcccaggctggaatcaagtggcacaatctcagctcactgcaacctctgccccccagcttcaagaaattcaccttttgaacaaggagatattaaggatacactatgtgtatgctaccggtggttgcaggagactcagaaaagagagaaacagtcactggcctcgtgcaactgatattctcgggaggagagaaaggcaatcaagaaagaaacatgctgtatttcagacagctgtaagtcctccacaagaaaagaaagcaggtgaggaacataggaaatgtgtcaaccataaggttcccgctaattctataagttggtcagggatatcctccaagaataagcagcatctgagcaatcacctgaagggaggaaggaaggaagactgtgagtggtggcttacacctgtaatcccagcactttgggaggccaaggagggcagattgcctgagctcaggagttcacgaccactcagagcaacctgttgatacccaatctctactaaaaacacacaaaaaaattacccgggtgtggtggcacgcacctgtagtcccagcttccatgcccagctgatttctctctctccatatatatatatatatacacatatattgtttttgcagagatagggtctcactgtgtcacccagtcatcaagcaattctcttatactgttttggaaaagcatgggaattacaggtgtgaaataccctgctggtcctgaaaaatgtgatatttgggattctctgcctggcttgttttacccaaaataatgacctccagttccttccaggttgctgcaaaagacatgattttcactgttttataactgaatagtattcctgtatgtatacataccacattttctttatttattcttctgttgattgacatgtagggtgattccatgtctttgctactgtaaataatgctgcagcaaatatttgtgtgcattttgatctattcctttgagtaggtacccagtactgcaactgcaggactgagtagttgttatattttttgttctttcagaaatctccatagtgtttgccataaaatctgcactaatttacattcccaacaacaatgcataagatttccccttttctccacattctcactaacatttgttatgtttttgtctttttcataatacccattctgactggagtaagatatctcattgtggtggttgttgatatttttgagacggggtctcactctgttgccagactggagtgcagtggtgtgatcgtggcttgctgcaacctccacctcccgggttcaagcaattctcctgcctcagcctcccgagtagctgggactacaggcgcgtgccaacaggcctggctcattttttgtatttttagtaaagacagggtttcaccatgttggccaggatgatcacagtctcttgagctcatcatacacctgcctcagcctcccaaagtgttggaattacagtcatgaggcagcgcacccaacctcaatgtggttttaatgaccatttctctgacgattcatggtgtggagaatttctttgaaataccttttggccatttatatgtgctcttttaaaaactgactcctgtccaggtgcggttgagcatgcctgtaaccccagaacttcgggaggctgaggccaatggatcacttgaggcaaagaggcagaaatcagcctggccaacaaggcaaaaccccatctttactaaaaatacaaaaaatcagccacgggctgtgactcgtgcctgtggtgcaagttactcaggaggttaaggcacaggaattgcttgaacccggtaggcacaggtcacagtgagccaagatcatggcactgcactacagcatgggtaatagagaaagacctgtctcataaaaacaaatgaataaataaataagataaaaaataaaaaagtctctttatgtcctttgccgactttttaatgggattctttggagttttctgttgtagttgagatctttgtttactctcggtattagtcttttgtcaaaggaaaagtttacaaataatttcttccgttctgcagtttgtctgctcactctgttgagaggattatttctttggctgtgcagcagctttttgtttcagtaaagcttttgaatttatataattaaaattttcagtttggtttaaatttgcactggtcgatttttggttttgttgcctgtacttttgaagtcatactcttgaactctttactagacaataaccagaagagttttctctagttttcttctcacatttttattatttcagtacatatatttaagtctataattcatcttcaattgatttttgtagaaatagtgagaaataggagtccaggtttattcttctgcaaatgacaattcaattgttccagcaccaattattgaaaagggtgtgctttcctcaacgtatattcttatcagctttgtcaaagatcagttggctataaatgtgtggctttctttctgggctctctagtctgttacatcaatctgtgtgtctatctgtatactactaccatgctgtattggtgatgatggctttgtaatataatttgaagtcaagaaatgtgatgctcccagctttgtttatttgcttcagaaaggctgagtcaacagctgcagagatgaagctgcccctcctcgcagggctccttcccggaaaaagatcatggctcccactgaccatataaccatggctggaactcctgaaattcccaaagggaggccctacccagtgaggggggatgaatgaaggtcctacttaaggaatctgtctggccacaatcaggcacagcagctgtgctgccttgtgggggaccagaccacctggattccctggagcctgcaggctagaatgtctgagtccatggaaacacagaaatggaggccgccctcacctccccagaaaactgtagtctcaggcagtctccagccgattgccactggttggctgctattccaagccagtgggtcttaacttgagaggtgctgtggaagtggggcccacggaatgaggctgcttggctccctggattcagccccttttctaagggaatgtacagatggaactcccgccttgcccagctttccaagtatataaaactcctgagtctctgtgagtgtctgagcgagtgctctggcaacattcgacacggctctgtgtatctgacccaagacccttatggcatgagctaatgggaggatcttctgatccatgcgtggcaaagatgcatgggagaaacatggtttgtgggtaggggttgtgcattcactactgcttctcttggctgtaggtgaaggtttctttggctctgtgctgatactgggtgcaccatcacccaccccctttgtttcttctcctgggtcaagtcatttgcctaatcagtcccaatgtaggaacctggatacttcagttcaaggtgctgaattcaccgtgcttttcattcaggggaagacagctgcttctcattgggcatcttggcctgcccacttcacgtcactttttgtaaaatccacaccactccaggaatatccattacttaacttcgcctgaaataaacagaaggctcattacacttatcatgggctcacttacttcgcctataatgaaggtgccatggaaatgctagtggatgacgtggtccattttcttagggatgagatagaaaaatggtgtatggctttttaatttaattaaaatttttagtttggtttaaatttacattggtctctttttggttttgttgcctgtacttttgaagtcttactcgtgaactctttactggacaatgaccagaagagttttccctaagtttcttctgatattttgaccatttcagtacatacatttcagtctataattcactttaaattgatttttgtaaacatggtaagaaataggagttcagatttattcttccgcatatgataatgcaactgtcccagtaccaattattgaaaagggtgtgctttccctagtgtatattcttgtcagctttgtcaaagatcagttgcctatgaatgtgtggctttcattttggattctctcgtctgttacatcaatctgtgtgtccacatttatacctgtaccatgctgtattggtgactatggctgtgtaatatattttagagttaggaaatgtgatgctcccagctttgttcatttgcttcagctgaaaaggttgagtccacaattacaaagatggcagccgcccatccccggaggacctccaacccagaaagagatcaggcttcccaccaaccctataaccctggctggagttcctgaaattccaacagggaggaccttcccagtgaggagggatgaatcaaggtcaaatttaaagaaacagtctggccactatcaggcacagcagcagtgctgccttgtgggggacccctcctgctccagaccagctgccctccctggagcccgaaggctagattgtctgagtctacggaaacagagacggtggccgccccaaccacccagaactcggtagtctcaggcacttggcttgctatcttgccactgcttggctggtattccaagcccgtgggacttgagaagtgctgtgatgatggggaccacaggatgaggctgtctggctccctgtgatatggctgtgatgagtggaggaacaccagggctcatgtctcacacagaattggagaaaatgacacaaacacatgtacagtggttttatggcgtgcagtttaataggcaagaacgaaggaagagctccccatactgagacagagggaggggggctccaaagccaaaagaggaaacccggagtgctgtggataccaatgagttatatgaagaaactggagggggcggtgtctgatttgcatagggttcaggcgattggttcgaccaggcatgtcatttatgtggcccacggaaaaactggccctcccacctagcctttgaatatgcacgtgccggacaccctgatttcctacactcatggggatatatgggggtggccatatcgccaggcacaggtggggacaagggccagaagagggcgggaatcgctatgtttgggtggacccagtttctaatggccggcatctgcagatcaaggttaccggagaactctaaaagccggggctttcctgctagacaagactcatttctggagctgctttaaaaagaaacaaaacttcccaaggaccccttttcctccctgtctgcccaaaataatttcttaacaactcgtataacacctgaattcagcccccttactgggggaatgtaccaacggaactcccacctttcctggtttctcaaggctagattgtgtaaacctcctgggtctcggtctgtgtctgagcagctgctctgccaacactccacacagccctgtgtactaggcccaaggccgccgtgactcagcccatgggaggatctcctgatttcttggttgcaaagatccatgggagaaaaatggtttctggggcggggtcacacactcatggcttctcttggctgtgcaagaaggttcctttggctctgttccaatatagcgtggttcatcacccacccctgttttctttgttctcctgagtcaagttgtttgcctagtcagtcccaatgtgagaacctgaatatttcagttcacgtgcttatcgtgaaattcactgagactttaattcagtggaaggcagcctcttctaattggccatcttggcccgccccctccacgtcacctcccataaaatggccacgctctccagggacgatgccattatatatctttacgtgaaaccgacagaacacttattacactttttgtgagctcatttacttcacttataatgaacatggccatggaaatgctagtggagaaagtggtcgattttctgatggatgtgataaaaaaatggtttgccgaccaattaatgacatatgtctcaaaactagtaacgagacccttaatcgctgggttgaagtttctaatcaagaagatgctcatctatgtattcaacaaagcagcttcccttgcttctgaaatgcttccaaacaacatctcatatttcctgaagaagataatgcctggacaagcagcacaagtcattcaggtttactttcagctcataaatccagcaggatattcgcacaattgttgggaaaccttatcagttcatgagtcgtgcatgtttcctttaatttcaggaggaagagggtaatctggaagagtttcctgacctactctgctgctgtgattaaacaaccaccaggaaattttgatgacactgttctcctgagctcctccctttcctcggggaagaaaagcattgaaactacaaaaataaagtgttatttggctggagtgaggtctcatgtctgcttatgcggtggctcgctgctcagaacagggtgagtctctgagttgtacgctgaggaggggaggctgtcaatctagaaaaaacccattgcatgggacacctccatggggtctggggggctgaggatgaggagctggactggatctagggaaggaggaggtttcagagggtgaaattctggcagtaaatcctgggggtgtttgaaaacttcctccctcagaaggagaagactcagggaggaataaggacaaaccatgggtcccttgaggggcatttactaacttaagaggactttatcgggaagcagagtgacaatggcctccttgaggactgaggcccctggataaatgaggcccagatccagatccagtccatgggagatgagaccttcaagggacatatttttgttgggacagaggaaaagtgcagctctgcagctgcagaggaagccttggcagtgtgaaagcgaccttggagggggccctgtgcgttctgaatgcttctgaggtccatcccctgtccccgcctctttttctggattttttgggctccatggtctccgccatcttctgagcgctccacgctgccaccttcagttttctcttctgggctccaaatactccaaaatctttcatatctgtgcccctacccctgtttttagcatgtgttgggactccaggtccctgaaggtttctggcctgaaatccacctccccagcggtgtggattctgctctagagaccccgcacttggcaaggttcccaggcccctgggggacaaccgagtggtatgtgcacttcagggctccacactcggcaaggtctttcaagcccttggggttccctcctcagttttcttcacatgtctgggatgtagtcactctataaatgccgggatgtgatccccaccccagtgattttttttagttccatgagtgttgctatctgaatagtcatcctgagagtgatgggaccttttgaatttgcagcaagttttagattagtgtgagtggcctgagatcgcaaaactggggctagcattggatgtgaggttaggctggtggaaaaatttgcccagaacctgaggagtgtgggctcactgcaggtggttaggatcagcacagaattgcaaggatgtatagctttggggtaaagaataacatggttcagaagtacatgtattagtcttttcatgcattgctataaagaattacctgagactgggtaattaattataaaaactcaggtttaattggctcatggttccacaggctgtacaaaaaggatgatgctggccatcagctcaacttctggggaggcgtcagaaaacttagagtcatggcaaaaagcacaagggaatcaggctcatcctccatggccagagctggagctagtggtaggagaggtgctgcacacttttgaacaatcagatctttttagaactctatcaccagacagcacctagaggatggtgctaaattattcatgaaatatccacccatatgatccactcaattctcaccggcccaaccaggaccacctccaccattggggattacaattacacatgagatgtgggtggggacacagatccaaactcgatcagtgggcatcttggactgggtctactatagaagaagaaccaggagctgactatcatccttaagactgcccatgatggccaggcagggtggctcatgcctgtaatcccagcactttgggaagccaaggtgggtgaatcccctgaggtcaggagtttgagaccagcctcgccaacatggtgaaaccctgcctctactaaaaacacaaaaaattagatgggtgttgtgccagacgcctgtaatcacagctactccagaggctgaggcatgagaattgcttgaacctgggaggcggaggtggcggtgagccccaatcgcactgctacactccagcatgggcaacaataccaaaacatcgtctcaaaaaaaaaaaaaaaaaaaaaaaaggctgcccatgaccactgccccagtgagagggacaccagcatggctaagatcaagtgctggacattcttcatgggtcagacattaaagcaggccacactgttacagagatgggctccattcatagcaacaaagtggtgagaagatgtgggaatggcagaggccagcactttgccatcaatgcaaggtgggcataaggagctggcaccagtgccagagtgcatcaggggaggactgctttgcaatatctagcacttacctcttagagtatgtttcattagggacaacagatataaatggcagacaagtgagtcccttcagtaacaggaaatagaaatcatcaagaggaacagaaacagatgtcagcagccctcatataaagtcatcatccttcatccagttaaaacctgagacagttctcacataagaaggtctaattcaaaaagagactgggttctcatgaggcaggttcatgcaaaaccaagggaagtatacaactttgggattctccagcttcccttggaaaagacctacaatcatttgcttaggtaactgagcactgaacaaaggtgagtattgttatctttcagaagctgttggccatgaaggtcttgctggcataaaacccatggttggaaacatcaccatgacccctgttagagtaatggcctaagggcaagggtcaggaaattgatgtattccttgccaacttctgcgagacgagtgttggtccactcatctctttcacggaattcaccagtctggtatcttcaaaatccagaaggatgatggcagatggcaggaaactaatgcaaacaccatcagttgtacctccactgtagcagcagtaatggatgttatctcttcattgtaatatccagggagggagaagatgacattattctcaatattctaaacaccctgtgtgtacagcctctgtgatattttttgtaatatccgtgtgggagagaattatattactcctaatatctcaggggttgtgccccctctgtgacaatgttcctaacacccaggaggggataggatgatatcacttttagcatcacagggggtgtacaccccactgtaatattgttcataatatccgggggggagagaatgatattactcccaatatcgcaaagactgtacaccaacctgtgatattatttgtaatatccataagaggaagaataatattactcccaatgtcacaggaagtgtacacccttctgtgatattgttcaaaagatccagttagggaggggatgatattactctcaatatcttaaacaccctgtaggtaagccctctgtgatattcctcataatatccagagggagaggatgatattactcccaatattgcatgaagtctacaccccacctgtgatattgttcctaatatccaggatgggagaggatgatattactcccaatgtcgcaggggatgtacaccttccctgtaatattgttcgtaatatctagaaaaggagaggataatattactttcaacatcgcagggggtgtacaccttccttgttatattgttgctaatatccagggaaaaagaagatgacattaccaccactattgcagaaggtgtacacccccccttgatatagttcctaatatccagaaaaggagaggagatattactccaaatattgcaagaggtgtacattcccctgtaatatttttcctaacattcaggaagaaagagagtgatattgcccttaatattgaagggagtgtgccccccccgtgatattgtttctaatatccaagaaatgaaaggatgatattactcccaatatcacaggggctgtacagccccctcccatgatattgttcccaacatcggggggggggtgaaatagtattattcccagtatcacaataggtgtacacacctgtcgtgatattgttcctaatacccatgggggaaaggacgatattattcttaatatctcagagggatgtacaccctccctgtgatattgttcctaatatccggggtgggagaggatgatattacccccaaaatctcaaagggtgtacacccctcttgtgatattgttcctaatatccagggtggagaggataatattattcccaatatccaggaaaggaaacgatgatgttactgtgaatattccagggggtgtcctcccctctgtgatattgttcctaatatccaggttggggagattatgatatttctccaaatatcacaaggggtgtacaccaaccctgtgttattgttcctaatatcgatggggggagaggacgatattactcccaatatcacagggggtgtacaccacctttatgatattgttcctaatatccatgaagaaagaggatgatattactttcaatatcgcaggggatgtacactccccctgtgatattgttagtaatacctaggagaagaaagtgtgatattactcccaatatcgcaggggatgtacacgcttcctgtgatattgttcctaatatttagggggaaaggggatgatattactcccaatatcgaatggtgtgtacacccccccgtgattctttttttttttttttttttttttttgagatggagtcttgctctgccgcccagactggcgtgcaatggcgcaatctcggctcactgcaacatttgcctcccaggttcgcacgattctcctgcctcagccttcggagtagctgggattataggcagctgtcaccataccaggctaatttttgtatttttagtagagttggggtttcaccatgttggtcaggctggtcttgaattcctgacctcaaataatccacccaccttggcctcccaaagtcctgggattacaggcataactttccctgtgatattcttcctaatattcaggaagaaagaggatgatattgctcccaatatcgcagagagtgtgcactcctcctgtgatatggttcttaatattcagaggaggagaggatgatattactttctatattgcagaaggtgtacacctccctcgtgatgtctttcctaatatccagtgggggagaggttattagtctcaaaatcacagaaggtgtaaacccccatttgatattgttcctaatattcaggggtggggagagaaaggtattactcctagtatttcagggcatgaacacccccaccgtgatatcattcctaatatccagaaggggaggcaatgatatttctcctaatatcacaaagggtgtacaccccttctgtgatattgtaaatattctgtgtgtacacccccctgtgttatagtctgtaatatccgggtgggggagagggtgatatttctccccatattgtaggggatgtacacccttctgtgatatggttcgttatatccagggaagaaaaaggtaatattgctgcccatattgtggagagtgtacacccccatgtaatatggttcgtaatatccaggagtggagagggtgatactgctccttacatcgaggaaggtgtacaccttattgttatatgattcgcaatatccaggggaggagagagtgatattgctccccatgtcgcagggggtgtaaaccctccgtgatatgattggtaatatccaggaaaggaaagggtgatatttctccccatatcgcgggggacgtacatcctcctgtgatatggttcgtaatatccaggaggaaagaggaaaatattgctcttcataacccgaggggtgtacaacccctgtgatatggttcgtaatacccagaagtgtacacccctctgtgatatggtttgtaatatccagggggttagagggtgatattgctccccatatcgcagtgggggtacacccccctggattggttcataatattcatggggggagaaatttacatttatcctcatatcagggggggtgtacaccccccgtgatatggttcgtaatatccaggggaagaaagggtgatattgctccttatatcgcggaaggatcaccctcccctgtgatatggttcataatacccagacgggaagagggtgatattgttcttcataaagcgaagggtgtacagccccctgtgatatggttcataatatgcaaaaggggagagggtgatattgctccccatatcacggagggtgtactcccttctttgatatggttcgtaatatccaggggtgtagatggtgatatagctcgccctattggggagggtgttcacccctctgtgatattgttcgtaatgtccagggaaagagaggatgatattactcccaatatcgcagaaggtttacaccactctgtgatattgttcataatatccagggaaggagaagacgatattactcccaatatggcagggggtgtagaactcctgtgatattgtttgtaatatccaggcaaggagaggatattactctcaatatcgcagaaggtttacacccctatgtgatactgttcatgatatccagggaaaaagaggatattactccctatatcacaaagggtgtacacccctttgtgatattttttgtaatatccaggggagagaggataatattactctcaatatcagaaggggtgaaaaccctcctgtgtcattgttcataatatttagggaaggagagagtgatattactccaaatatcacagtgggtgtacacccccctatgatattgttcctaatttccagaaggggagatatgatattattgccaatatcgcagaaggtgtacaccttactctgacattgtttgtaatatccagatggggaaatgatgatattactcctaatatcacagggggtgtacacccccttgttttattgtttgtaatattcaggggaagagacgattatattactcccaatatcgcagggtgtgtacaacactctatgatattgttcataatatccaggggaggagaggaagtgtacacccccccgtgatattgttcgtaatatccagaggtagagaggatgatattactcccaatattgcaggtggtgtacacctttctgtgatattgtcatgatattaagaaggggagaggatgatattactaacaatatcacaaaaactgtacactccctgtgatattgttcataatatccagaagaagggaggatgatattattctgaatctcgcagaagatatacaccaccctgtgatatggttcataatatcctaggggaaagaggatgacataactgtcaatatcgcagggggtgtacaattccctgtgatattgttcacaatattcagagggaaaaaggataatattactttcaatatcgcaggcggtgtacacattactgtgttattgtttataatatccggaatgagagaaaattttctcccaatatcacaggaggtgtacactcccctgtgatattgttcgtaatatccagggaggggagaggatactattactcccaacatctcagggagtgtaggccccccctttgatattgttcctaatattcggaagtggagaagatgatattacttccaaaatcgcagggggtgtacactccctctgtaatattgtttctaatattcatgagtggaaagaaagatattactcccagtattgcaggggacatacaccacactgtgatcttgttcacaatattcgggggggagaggatgatattactcccaatatcaaagtaggtgtacacccccttctgatattgatcgtaatatccagaattaaagatgataacgttactcccaatattgcagggggtgtacatttttgaatactgttcataatattaagagggggaggggatgatatctgtcccaatatcgcaaagtgtgtacacctcctgtgacattgtcccaaatatccagaggaaaaaaggatgttattactcttaatatctcagagagtgtacacctccctgtgatattgtttgtaacatccagaagaaagaggctgatattactcttaatatcgcagggggtgtacacccccgccccgggatattattcgtaatatccagggggaagtggaatgttcagaatgggagaggatgatattacttgcaatatcatagtgggtgtacaccccactgtgatattgtttgtaatatccgggaaaggagaaaatgacattcctccccatatggcaggggctgtacaccacctatcatattgttcaaaatatccagaaggggagaggatatgtctccaagtatcacagggggtgtacaccccgctgtaatattcttcctaatatccagggtgtgagaggataatagtactcccaatatcccagggcatgtacaccccccttgtgatgttgttcctaaaattcatggggagaaagaatattactcccaatatcacagggggtgtacatacactctgtaatattgttgccaatatgcagcaggagagaggatgatattactcccaatatcacaggggctgtacaccccgctgggatattgtttctaatatcaagggggaaaaaggatgatattactcccaatgtcgcagggtgtgtacttcctctttgtgacattgttcctaatatccaggagagaagagggtgacattccttccaaaactgaaaggggtgtacacaccctttgagatattgtctttaatatccagaacgaaacaggatgatataactcctaatactgcaggggggtacaccctctctgtgatactgtttctaatatccaggaggggaaagaaaaatattaatcccaatatcacagggggtgtacattccccctttaatattgttcctaatatccaggaagacacaggatgatactatttccagcagcacagggcatgtacacccctttgtgatattgttcctaatatccaggaaaagagaggatgatattactgtcaatattgcagggcgtatacactggttctgtgatattgtttctaatatccgggggtggagaaaatgatattactcccaatattccagcgggtgtacacccgttctatgatattgttcctaatatctgggggagagagaatgatattattgtcaatatcacaggggatgtacagattccctgtgatattgtttctaatattcacagggggagaagggtataatactcccgatatcgcagggggtgtacactccccctgtgaagttgttcctaatatccagggattgagagaatgatattactcccaatatcacaggcggtgtaaaccccctgtgtgatattgttcctaacatccagaggaaaagatgatgatattattttcaatatcacagggggtgtacgcatccctgtgatattgtttctaatatccaggggaggagaggatgatattattgttaatatcgcagggggtgtaccccaccctgtgatactgttcctaatatccggggtggaagaggataatattgctcccaatatcgcaaagggtgtacaaccttcctgagatattggtcctaatatccagggagggagaggatgatattactttcaatatcacagggagtttacacaacccctgcgatattgttcctaatatccagcggaagaagagttaggataatactattttcaaaattgctgggtctgtaccccctccccgtgatattgtttctaatatccaggaggggagaaagtaatatgactcccaatatcttagaagatgtacaccctccccataatattatttcttacatccagggggtagaggatgattttgctttcaatatcacagagggagtaaacctttccggtgatattgtttttaatatttaaaaagagagaagataaaattactcccaatacaaaggggatgtattgtgtactcccccctctgatattcttttttaatatccagatggagagaggatgatattactttcaatattgcatgggatgtataaatcccctgtgttattgttctgaatatacaggtggggagagtatgatattactccaaatatcgcagggggttctttccccctgtgatattgttcctaacattcagggagggagaggatgatattactcttaatattgcagggggtgtacccacgcctatgatattgttcctaatatccagagggggagaggatgatctaactcagaatatgacaaggggtgtacacacagcctgtgatatggttcctaatatacaggggagaaggggataatatttctcccaatatcgcagggggtgtacaaccccctgtgatactgttcctaatatacagaaggggacagcatgatattgttcctaatatcgcaggaggtgtacaacgccctgtgatattgttcctaatatccagggcgggagaggatgatattaccctcaatatcgcagggggtgtgcactttccctgttatattgttcctatgatccgggtggggggaaatgacattagtcccaatatcgcaggatgtgtgcaccgctcccccgtgatattgttcctaatatcaagggggagagaggaggatattactcccaatatcgcaagggatgtacatcctccatgcgatattgttcgtaatattcaggaggagagaggatgatattactcttaatatcgcagaaagtggacacccaccctgtgatgttcttcataatatccagggaagcagacgattatatgactttcaatatcgctgggagtgtacatcccttttgggatattgtttctaatatccaggaagggagaggattatattactctcagtattgcaggcagtgtacaccttttttgtgatattgttcctaatattcagaaagggaaaggatgatattactcccaatattgcaggtggtgtatatccccctctgatattgttccttatatcaaggaagagaaagaataatattactcccaatatcaaagacagtgtagacccctcctgtgatattgtatttaatatccatggggaaagaggatgatgttactcccaatatcgcagggggtttacacccacactgtgatattattcctaaaatccagtggaggagaaaataatattgctcccaatattgcagggtgtatacaggccctcccccgttatattgctcctaatatccagcggtggagaggatattactttcaatttgtgtagggagtgtatacccccctgtgatatttttctaatatcaaggatgggaaaggatgacattactcccaatatcgcaggaggtgtacacgccctgtgatattgttcctaatatctagggaaggagaggatgatattactttcaatattgcaggagctgtacaccctctgtggtattgttcttaatatttaggttgggagaaaatgatatgagtccaaatatcgcagaaggcatacacacttccaataacattgttcttaatatccgggggagagggtgatattactcccaaaatctctggggggtgtacacccccttctgatatttttcctaatatccagggaaggaaacgatgatattactataaatattccaaggagtgtacaccttcctaatatcctaatattgttcctaatatccaggggtgggagaggattatattactcccgatatcgcagtgggtgtacacccctcctgtgatattgtttctaatatccaagctaggagaaaatgatatcactctcaataccacagggggtgtacaccttccgcatcatattgttcctaatattcagagggaaagaagatgaagttactttcaatatcggaggggttgtacacaacccctgtgatattgctgctagtatccaggaagaaaggggattatgttactccccttatagcagggggtatacacctcccctgtaatattgttcctaatatcaaggctgggatatacgtggggggaaggatgatattactcccaatatcgcaggggttatacaaccttctgtgatattgctcctagtaaccagggcagaagaagatgatattactcctaatatcgcaggaggtgtacactcccccattatgttgttcccaatatgcagaaaaggagaggatgacattattgccagtatcgcagggtgtgtacaccacccctgtaatattgttccaaatatttagggggagagaggatgatattactcccaacatcgcagggggtgtacacacatcccctgtaatatagttcttaaaatctaggggaaaaggggatcttatttctctaaatattgcagagggtgtacactccccggtgatattgttcctaatagccgggagggagataattaaattactttcaatatctcagagagtgtacatcgcccttgcgatattgttcctaatatccagagcaaaagagaatgatattactcccaatatcttaggagtgtacatttaacctgtaatattgttcctaatatccagggggaagagaatagtattactgccaatatcgtaggggttgtacaccttttctgtgatattgttgcaaatatttagtagagggaaagaatattactcgcaatatcacagggaatgtatacttcccctgtgatattgttctgatatccagaaaaagagagggtaatattactcccaatattgcagggggtgtacaccccccttgtgatattgatcctaatataaaggaaggaagaggatattactcctcatatagaaggggttgtccaccccccttgtgatattattcctaatattcagggaagcagaggatgatattattttcaatatcacagagggtgtgcagtccacctgtgatattgttcttaatattcggggggagaggatgttattatgcctgatatcgcagtagaggtacacccctcaagtgatactgttcctaataaccaggggtgaagaggatgatattactcccaatatcgcaggtggtgtacacccccccatgatggtttctaatatacagagggggagaggaaaatattactcccaaaatcgctggaggtctacaccccccttgtgatattgttcctaatatccaggaaaggaaacgatgatattactgtgaatattccagggggtgtacacccgctttgtaatattgttcctcatatccagggtgtggagaggattatattactcccagtatcgcagggggtgcacgacgcccctgtgatattgtttttcatatccaggaggggagattattatcaatatggcaaggggtgaacaccccctgtgatattgtacttaatagttaggttggcagaaaatgatattagtctcgatatcgcagggggtgtgcactccgcctggtgatattgcttttaatatcaagggggagaaaatggcattactcccaatatcgcagggggtgtacaccgctcatgtgatattgttcctaatatccaggtggagagaacataatattactcccaatatcgcacaaggtgtacacccctcctgtgatatggttcctaatatccatgggaggagatgatgatattactcccaatatcacaggggatgtacaccacccttgtgatattgttcctaatatccagggaagaaaacgatgatattattgtgaatattacagggagtgtacacactccctgtgatattgtttttgatatacagggtgggagaggatgatattactcccaatatcacataaggtgtacaccccccgtgatattgttctaaatatttcggtggggagaaaatgatattagtctccatatcacagggggtgtgtgctcctcaggtgatattgtttttaatatcaagagggggaggagattatattactttcattatcacagggggtgtacacccctcctgtgatattgttccttatatccaggcgaggggaaaataatattactctcaatatcgcaggaggtgtacacaccccatgtgatattgttcctaatattaagggggaaagaagataatattactttcaatatcacagggtttgtactcctttcttgtgatatagtttttagtatccagggggaaagagcatgatattactcccattgtagcaaggggtgtacacacctcctgtgatattgttcctaatatccagaagtggtgaggatgatattactcccaatatcgcagggggtatacaccccacctatgatattatttctaatatccatgggaaaagagtatgatattacacccaatgtcgcagagggtgtgtatttttcctgtgatattgtttctaatattcaggcggggagaagatgatattactctcaatatagcagaaattgtacatccccgctgtgatattcttcataataatcagggaaaaagaggatgatattactaccaatattgcaggggggttacacttcccctatggtagtgttcctaatatccaggaagaaagaggatgatattaatcccattatccaggaagtgtacacccaccctgtcatgttgttcctaatatccagcagggaagaggatgatattacaccccccccccgtgatattctccttaatatccaggaggggagaggctgatattactggatatatagcaggggtgttcataccttctgtgatattgttcctaatatccagaaaaggagaggatgatattacttccaatatcgcagaaggtgtacacctccctgtgatattgatcctgacattcagaaggggagaggatgatattactcaaaataccgcagggcatgtgcattcccttgtgatattgttcctaatacccagaagggaacaggataatattactttcaatatcgcagggagtgcacacccccctttggtatggttcttaatatccagaaggaaagagggtgctattactttccatattgcaaggggtgtacaccccactgtggtatggttcataatatccaggcagggagagggtgctattactccccacagtgcggggcatgtacaccctgctgcggtacggttcctaatatccagggggagagaggatgctatgactccctatatcgcggggtgtgtacacccctgtgtggtatgttttgtattctccaggaacggagagggtgttgttacccctcatatcgctggaaatgtacactcccctgtggtatggttcgtaatatccaggggattgagggtactgttacccccatactccccatatcgtggggggagtgcacctccctgtggtatggttcgaaatatccagggtaagagagggtgctattattccccattttgcaggaggcgtacacccccctatggtatggttcgtaatatccggggtgaggggatgctatcaaaagaagagagaaagagaccccccatattgttctatattattttatactcagtacctgttttaagaagaaacaaggaagtgaaaccaaaagcaggcagcccggcgccaggcaccagacccaaaaccagacccgaaaccaggcctgggcctgcctgaccttagcctgatagttaaaattcaacccatgacctagcaaccaatgttatccatagattccagacattgtatggaaggacattgtgaaatttcttgttctgtgctgtttcactctgattaccggtgcctgcagcccctgtcacatacccactagattgctcaatcaatcatggccctttcatgtaagatctttagtgttgtgagcccttaaaaaggacagaaattgtgcactcaacaagctcggattttgagacgctagtctttcgatgcttccagctgattaaaagccacttccttcactacctcggtgtctgtggggttttgtccgcgactcctcctgctacactatgactccccatatcaaggggggtgtacacccccctgtggttcgtaatatccagcaggggaaaaggtgctattactccccatattgcagggagtgtacacccccttgtagtatggatcgtaaaatcaaggggggagggaaggtgtaattatccccatatctcagggggtgtacacccctttgtggtaaagtttgtaatatccagggatattacagggatattatccccaaattaatacttttataatttcttatgcctgcctttactgcaatctctgaacataaattgtgaagatttcatggacatttatcacttccccaatcaatacttttataatttcctatgcctgtctttactttaatctcttaatctcatcatctttgtgagctgaggatgtatgtcgcctcaggaccctgtgatgattgcattaactccacaaattgtttataaaacatgtgtatttgaacaatatgaaatctgggcaccctgaaaaagaacaggataagagcgatgttcagcgaacaagggagataagcataaggtctgactgcctgtggggctgggcagaacagagtcacatttttcttattgcagaaaatgagtaggagaaatatcactgggaagggaacgcattcctaggggaggcctatggacggccgctctgggggtgtatcccttatgtggttgaagataagggatgaaatacaccctggtcccctgcagtgccctcaggcttgctaggattagaaattccagcctggcgaattctagtcagaccagttctctgctcttgaaccccgtttcctgttaagatgtttatcaatgacaatgcgtgcacagcaggacatggaacctcaatagtaattccattttctccctggccttgtgaccttgctaggcccttctgcccttgtgatcttttattgccatttgaagcatgtgatctctgtgacccactccctattcgtatccccctccccttttgaagtccctaataaaaacttgctggttttgcagatcaggtggtcatcacagaacctgccgatatgtgatgtcaccccggaggctcagctgtaaaatttctctttcgtactctttcactttatttctcagaccaggtgacacttaaggaaaatagaaaagaacctactttgaaatattgggggctagttcccccaatagacattgttcctaatatccagaaaaaaagaagatgatattactcccaatatcacaggggttgtgaaccccacctgtgatatggttcctaatatccaggaagggagagaatgatattactctccatattgcagggggtgtgcacatccctgtgatattgttcctaatatccaggggaggagagggtgatattactcccaatattgcaagggttgtaaactccaccctgtaatattgctcctaatatttaggatttagggggggagaggataatattactcccaatatcgcaggggatgtatatgccctctttgatattgttcctaatatccagggggggagaggataatattactttccatatcacaaagagtgttcacccccctgtgatattgttcctaatatccaaaaaggaagaggatgatatcaatcccaatatcacaggaagtgtacaccccccccttttatattgtttctaatatccaggggaaatgagggtgatatttctctcaatatagcagaatgggtacactccccctgggatattattcctaatatccaggggaaaaaaagaggttgatattcttcccagtatagcagggaatgaatacaccctttgtgatattgcttctaatatcaaggggaaaagaggatgatatgactcccaatatcacaggggatgtaaacctgtggcgttgttgctaatatcaaggagggaagagtatgatattactcctaatgtcgccgaaggtgcacactttccctgtgatattgttcctaatatccaaaagggaagagaatgatattacccccagtattgcagggtgtacaccacccctgtgatattgctcctaatacccaggaaaaaagagaatgctattacccccaatatctaaggggacgtataccttccctgtgatattgtttctaatatccaagtggggagaggatggttttactctcaatattgcagggagtgtacactccccctgtgatactgtttctaatactcgggctgggagaaatagtattactcccaatatcgcagtgatattgtttccctgtgatattgtttctaatatctagtgggggagataattatattactaccccatacacaggggagggtgtacattcccctgtgatattgtttgtaatatccagggaaggagaggatgttactcccaatatcacaggggttgtacaccccttttttgatattgttcctaatatctggggggcagagaattatattactgtcaatatcacagagtgtgtacaccccctctgttatattactctttatattcagggcggtagaggatgatattactccctatatcacagggggtgttcacccctcctgtgatattgtttataatatctaaggggaaagaggatgatatcactctcaatatcaaaggaaatgtacacctttcctgtgatattgtttttattatataggggggcagaggatgatattaagaacaataccacaggggatgtacacccacgtattgatattgtccctaatatgtatggggaaagaggacagtgtaactcccgatatcgcagagtgtgtacacccccttgtgatattgtttctgatatacacggggagaaaagataatatttcttccaaaattgcagggggtgtacaaccccctgtgatattgtttttaatatccagtgggggagagaatattactcccaatattgcagggcgtgtacacaacccctgtgatattgttcctaatatccagagtaggggaggatgacattactttcaatatcgcaaggggtgtacattcccctgtgatattgctcctaatatccatgaggggagaggatgatattattcctaatatggcaggggctgtacaccttccctgtgatattgtttctaacatccagtgggggagaaaatgatattactccctatatcacagaaggtgtacactttccctgtgatattgttcctaatatccagaaggggagaggataatattactcccaatatcgcaggaagcttacaactcccctgtgatattgtttctaatatccagggaggtagggatgatattactcccaatatcgcaggggatgtacactcccccgtgacattgtttctaataaccagggggtgagaggatgatattacgcttaataccgaagggggtgtacacacccttgtgatattgtgcctaatagccagggggaagaaaattatattaattttaatatttatggggaaaaaggatgatattactcccaatatcacaggggctgtacaccgaccttttgatattgtttttaatatccagaagagaagaggataatattgctcccaatatcagaaaaggtgtaaaccccttctgtgatattggtcctaatatccagggagggagagaataatattactaccaatatcacagaaggtgcccacccccaaggtgatattgctcctaatatccaaagataatagggtgatgttactcccaatatcacaggaggtgttcacaccccttgtgatattgtttctaacgtacagggaagggagaggatgatattattcccaatatcacaggaggtgtatactcctctgtgatattgattttaatattcggggggaaaggatgatattactccctatatcgcagagggtgtacaccctctgtaatattgatcctaatatccagggcgggataggatgatattactcccaatatcgcagaaagtctacacaacccccagtaatattgtttttactatccagggggaagaggatgacattactcccaatttcacagagtgtgtacactcaccatttgatattgtttctaatatctagggggagagaatatattactcccaatatcacaggaattgtacaccacctctgtgacattcttgtgaatatccggggaaaaagagaataatattactcccaatattgcagagcgtgtacacccctccatgatatcgatactaatatttttttaaagaggatgatattactcccattgtcacaggatgtgtacaccccccttgtgaaattgttcataatattctggggggagagcataatattactccccatatcgaaaaaggtgtccaccctccttataatatggttcctaatatccaggatattacttaatccaggatacttgtaataccctaaatatacaattgcttgaacctccacctcccaggttcaagcaattcttctgcctcagcctcccgagtagctgggactacaggggcacaccaccacacccagctaatttttttttcttgtatttttagtagagatggggttttgccatattggccaggctggtctcaaactcctgaccttgtgatctgcccacctcagcctcccaaagtgctgggattataggcgtgacccaccgtgccaagccaggaagaggatgctctatagatttccccaataagagatggctttgcagggccattccaaaatatgtcaaagaaatacatttggggataaaatactttgatttcctttagggaatgttatctattatgtgatgctataccagagtcaggttggagtcggttatcttattgcaacaaagagtctgttccgtcactgttgggatctctattttttcctcttatttcttgagacagggtctcactctgtcacccagtctggagtgcagtggtgcgatcttcattcactgaaacctctgcctcctgtgttcaggtgattctcgtgcctcagccccttaagtaactaggattacaggtgtgcgccaccacacccagctaatttttgtattttcagtagagatggtattttgccctgttggccaggctggtcttgaactcctggcctcgtgtcatctgcccacctcgacctcccaaagtgctgggactgcaaatgtgagctattgtgcccagccaggatctctgttttaatgttagtgctggtcactttgcatgaactccaaagggaagaaatataatgaggtgtgtctgaccccctgccttctcatcgtgacctgaattagtttttcaggtttgcaggggatacccttggacaagaaggggctctattcggttggttggggggattagaattttactttttgtttacaatatttctcctgaaagagttaggggctcacaaggaatttccgcgtgagcaacttatgaggaaagccatctgggaagatatgtgtccttgtgtcactgggatattctcgtttaccccaatgatacggcaatgacgcagggttgtgaaattacagctatgtgtttggggaaaaaagaaagcaggattgtgtgactacgtttccaaacttcacttgcccttagccatagtgagttgggggcctggagattctgttttctttcacaatgatatagatacaattaaatgtatagaaagcaaaaaaataaaaaggtgagtaatgaggaacctctgattcctgagtggccatgtagttacccatggcacagagccacagttactgaaggtaaagtttgctggggaatttagaaatgaatccagctcttggaggagtcagtttactggatgcctaagaaaatgcaaacaaaataagaaaaaagggtaatattcaatcccatagttattgttacctgtcatagctaaagtaaaattaaaacagagtgctggcttcaatcttgatgctacactaagcttagatttcagtgaatgtgagtctcagccactagctcagagccacctcccaaagaccaaatcatgtagggacaatagaaagtacttctgagaattgtggttaccaagaacctagtaactgttggggaggagcaaaacaaagtacagaaaccagagggtacaatctgagtgagactgctatcagcttctggaggagcctttactaaaatgaatgatgagagtaactggatgatgagagtaactaatggatgatgagagtaagcaatgtctttggttttcttttttttttttttttttttttagcagacgtctcactcttgtcgcccaggctggagtgtaatggcatgatctcgcctcactgcaacctccacctcctgggttcaagcaattctcctgtctcagcctcccgagtagctgggactacaggcactcatcaccacacctggctaatttttgtatttttagtattttctggtgagggtccaggtttccggaaacaactcagagacatatgttaagatgttatctttagttttcacagggaaccaaatatgttacgactccaatttccttggctattgttttaagttaccattaccttctcgttgatcaagttgctcatttacttctcaagcctagctagatgcctggaatttcccttgaaggaagtcaagattttcctttatctccatactggctgatggtgatcgagtaagcccctaagaggggtccctgctccatctcgagatgctgctagattctacagtgcctaataaacagctctcgcctggccgacaaagagctgcttgctctctggatagcaattccaaagtgaacagacaacatcctgtttggaagactgccactctgttagaagaagcatcaggaaaacctttcttttgagctatttataactaacagcaattgaccaagtatacttttgtgagtgaaactgacctttctccctgtaagaattctccaaaatttggaaactatttgtgagtatttttacttatggcaatataattattggcacaagctcaatcagattcggttttctttcgtaacaggaaccattggagatactcattactctttgaaggcttacagtggaatgaattcaaatacgacttatttgaggaattgaagttgactttatggagctgataagaatcttcttggagaaaaaaagactgggtatattttcaatatgctttccttttaaggtccctcacctgtggaaagtaaagaatgtcactttctgacaggctcaggaacctcaagttatgtagggatctcaagaagatgggggaattcacccagttcatacaggtgaaattgctgttgcaaagattatgaatatgagagaagtccagcatggctgacttcatctcgtgtctggcctcaggctggctgcccttgctcactcttgggcataggccaagctagccatgggaggaatttagtttatagtttaactttgaagcacggatgataatagtctctccctaaaatgaaccccttccttgctcagggactgaaactacctttgtatgacaaatgaaagcccacaagattaagattatgagaggggcctgaattctgctaaaatgcaggtgtagctgactgataacaagtcattgtcccacagcttgcctttctataatctcttgcttctcaggagtcacatggccagaggtcctgagatttccagtcctgtgacccccacccagagatggacttagtgcatgaggaccattttccacacccctatgatttcatcctcaaacaatcagcagcaaccattccctagccccctgccttccaaattatccataaaaatcctagcctctgagttattagggagattgattaataatcccagtcctaccccttgggttgctctgatttaattaaaccttctctactgcaataccacggactcagtaaattggttttgtctgtgcaatgggcaagaagaacatgttgcatggttatacaggtactacaagcacagtctgatggcaaattattggttttgcttcctgcccttgatgtttctaaacatctagtccaaaattacttgtgaaaggtccagcaaagccaattttaaaagaggctatatggccaatcactattctttctacacattattgcaaataatcaggccacggctgggcacggtggctcatgcctgcaatcccagcactttgggaggctgaggcaggatcacctgaaatcaggagttcaagaccagcctaggcaacatgataaaaccctgtctctactaaaaatacaaaattagccaggcatggtggcatgcacctgtaatcccagctacttgggagactgagggaggagaatcacttgaacctgggaggcagagattgcagtgagctgagatcacaccactgcactccagcctgggcaatagagtgagactttgtctcaaataataataataataatcagaccaagtataatgaaattaaaatttattttgcaaataaattggtcctactacaatttatccttcatagaaatgtggaaactgaagataaaaaaaattaggtttcagaagaaaactatactacacctgttattagattctagccctaaacattgtttttgaggtttttattatttacctgcaatttggtctaaattctgaattatttcctgactacaagtatccaaggaataaatgggttttctttttctttatgatagttttagttggcttctaatgcaacaacaatttttattgtaatcctgtgtgcattctattcctactattcaaattattaatgttatagatctttcattgtagtacttctgaattaaccaaaatcacagtattctgaagatgattctacaaagcctgctgtttctacaaaggctgctgatgatttctacaaagcctgctgtagtgttgctgtggcctctgcttaaaaaagtagaaaacacattgatgcagcatgttcaccccaacctccctgcctaaaggctcagggaccatcttggaagaggaaggcgcgtgagattgtaagagccgaattagggggatggagtgtggagaataaggacacttcatcttggatgctcacctgccaaattgacttctgatgaaagccagctccagaaatgtgcctacagttactactttcacctaaaccctgcccttagtcaaatccttctcttcttctaagcaatcaacttcaattccttgtataacccacagtataaaagggcttttataccattctatcctattgcatgtaagccttgggtctgggaggtaacagtgtgggattccaccatctcatctccctgccacccaaacatgcctgctcttctttaagcaatattaaatgtttgtacttcagaaatttgatttgtcagcctcttcttcagactctcagcttctttggcctttgggagtaaatttgcataggcctgctcaaaacaggatgttctgggggtttgggggtgttgttttgttttgttttttgttttgtttagagacagggtctcactctgtcacccaggttggagtgcagtggtgcaatcatggcacactgcagcctcaaactcctaggctcaagcaatccccccaccttggcctcccaaagttctgggattacaagcataagccaccatgcccagccctggacttttctttaaagacatttacacagtgtaggaattactgtgggtgcactgctcaggtccccttctccaggatgctcattcctacctcatagatgattttcctgcagagatttgacctcagctgaagggcagtcacctggtccaggtggttgctattcacctccttcctgagaacagccaacagccagggacacgctagcacagagatataagagcgaccaaggtgaggccccttctgtgctgcggtgcatgctccagagcctccctgggatcagacttaagagggtctccagccagatctggtcttcgctgctttcctcgagctccccagcgcactcctgcaatgcatcttttttttttttttttttttttttgagacggagtttcactcttgttgcccaggctggaatgcaatggcgcaatctcagctcaccacaacctctgcctcgcgggttcaagtgattctccttcctcagcctcccaagtacctgggattacaggcatgcaccaccacgcccagctaattttgtatttttagtagaaacgggtttctccatgttggtcaggctggtttcgaactcctgacctcagttgatcctcctgcctcagccttccaaagtgctgggattacaggtgtgagccactgtgcctggcccaatgcacctcttgaatcacctcctcatgctttgcttttagagaacatgatccccaacatgtgattccagcaaagattctagaaagccaaccgtgacaatcacttctgggtttagatgacccccccccaccacaagatggcagtgagcacctcatcacagaggtgctgatggtctgcagcaccgcgccaggccagaacgtgccttttacagaagaaaataacccagtagctgactaggatggtgaggagggctggtgagcactgcggtagtgagagggacactagcatcactgagatgcaagtgatggtcatttttcataggtcaaagctcaaagcaggggacagttacagggcagggcttcatagcaccagtgtgatgaaagtatctgggagtggctaaggccagcactatgccatgggaagcaaggtgggcctgaggaggaggcagcagcgtcagcctgcaacaagtgggggctgccctgcagagacctaagagtcatgttatagagcacagtgtctgtaaggccaagaagtgtggacagccaagtgtgtcaattactagacatactcaagaggagcaggaagggcagggcatggtggctcatgcctgtaatcccagctacttgggagactgaggaaggagaatcgcttgaacccgggaggtgaaaattgcaatgagccgagatttcgccactgcactccagcctgtgtgatgggagcgggactccatctcaaaacaaaaaaagaaaaaggaaaaagaaaaaaagaaaaacctaggtatacttctcaagcaaataaaaataatcaaaaccaatatcatgcccgggcacaaatttcatatatataacagatttaaatatatgagggtgattatcctctcatatctccatttttttttgtttttccatttttttctttactaaaaaaagttaatgccaatgacacacaatttttttttttttttttttttttgagatggagtctcacttcttcgccctggctggagtgcaatggcgtgatctcgactcactgcaaagtctgcctcctgggttcaagcaattctcctgcctcagcctcccaagtagctgggaccacaggagtgagccaccacacccagctaatttttgtatttttaatagagacggggtttcaccatattggccaggctggtctcaaactcctgatctcaaataatctgcccgcctcggcctcccaagattctgggattataggcgttgagccactgcgccccgcctatgtatgattttttttttaattttattttcataagtttttggggaacaggtggtattttgttacatgagtaatttctttagttgtgatttgtgagattttggttcacccatcaactgagaagtatacactgaacccaatttgtggtcttttatccctcacccccttcccaccctttcccccggagtccctgaagtccattgtatcattcttatgcctttgcatcttcatagcttagctcttgaacccttactttctgtttgagggagaagacatatcatctacaagtagatactgtgtaaacattccattgcatgactatcccataacttatttattatttgtgtttggttatttgctgctatgtaacaaccccactcccaactaaatggtgtgacaattccatgattctgtggatcaaaaattctgaaaagtcaaacccaaggagttttgtctctgctccatgatgctaaagcctccgcaggggtgaggcgaatggctcagggtgactgaaaagctcagggttggaacagctggggatgaggcctctatgtataagatgattcttcactcacaggtctgaaactatggtggggacagccagaaggctcggctcagctgggacagtcacctgagccctacacatgacctctccaacatggtgatcctgaagcagttgggtttcttacacagcatcacacttttcttttttttttttttttttgagatgaaatattgctctatcacccaggctggagtgcagtggcacgatctcagctcactgcagcctccgcctaccaggttcaagcgattctcctgctccagcctcccaagttgctgggattgcaggcgcctgccaccaagcccagctaatttttgtatttttagtagagacggggtttcaccttgttggccaggctagtcttgacctcttgacctcaggcgatccgcctgcctcggcctcccaaagtgctgggattacaggcatgagccaccgcgcccggccaaagctcacacttcttatgattcagccttagatgtcacatcagttcattttccccacacttattagtgttagaagtcacaagcccacccatactcaggggactggcacacagaccccactctcaatggaaggggtgggacaccaccattcctgctgatgggcatttgggtaacttcctgtttgaagctattaagattgggctgctgtggccgggcgcagtggctcacgcctctaatcccagcactttgggaggccgaggcgggcggatcacgaagtcaggagatcgagaccatcctggctaacacggtgaaaccccgtctttactaaaaataccaaaaaaaaaaaaaattagctgggcatggtagcgggcgcctgtagtcccagctactcgggaggctgaggcaggagaacggcgtgaacccgggaggcggagcttgcagtgagccgagattgtgccactgcactccagcctaggcgacagagcaagactccgtctccaaaaaaaaaaaaaaagattgggctgctgtgactattctagtaggtgtctttggtgagcgcctacacgtgtttctctttttctctttagtatatgcccaggaggggaactgctggctcccagataccgtatgttcagggtcacacacacttccacagggttttccaaagcccttgtaccagcacgcactcccagcacctgtgtgactgctccagctgtcccacagtctcatcagttctattgctgatattttcattttagcttaagttatatttaataggaaaattaccgttgcctctgccccccgttcctgcctgtaggagtttctcgtagctgttgctacaggtggccacaaatctgtcacttaaacccacacaaattgatgtccttatggctttggagtcagaagtgtcaactgaaggtactagcagggctgtactgacctggtggcctcagggagcatctgtgctgcttctccaccttctagaggctgctgcatccctcgctccagccccttcctgacaccactcaccctcctacttctgttatcacatcctcaccttctctgtgttcagggctccctctgtctctctcttgcaagcacacttgggattccattgagggccacccacataacccaggagaatttctccacctcaatatccttaacaactgcagagcccttttgccataaaagttaccattcacgggttccagggattgtgacatgggtagctttaggagtgattattcctgcctgtctcccgctcaccagaacttggactttctctctcaacaggagccccctgtgtgggaatagcctgtctcaacgacgccctctataaggacctgcttcctcaaaggacctcatagtcgggtcctgcccctcagtgtccagtctgccttggctggaggggctgcaggggtgtgttggcgccacctggtggagacagggcatcacagcaggtgggagcccagtagaagcacaaccaaaacatgggtaatgtttaaaattttctggctaagcgctgtggctcacgcctgtaattccagcactttgggaggccgaggtgggtggatcacatgaggacgggagtttgagaccagcctggccaacatggtgaaacatcccctctactaaaaaatacagaaaaattagctggacatgtggcgcgctcctgtaatcccagctactcgagaggctgagacacgagaatcgcttcaaccccggaggggttgccgagatcgcgccactgcactccaggctgggcgatagagcgagactctgtctcaaaaaaaaaaaaagaagaggggaggcgaggggaggggaggggaaaagggggaatttgtttggagctgagacatccatcttctcctgacctcagatatttgcactcctggttatgaagccttcacacttggactgaatacaccaccagctttcccgatttccagcgtgcaaatggcagatcgtgagacttctcagcttccataattacatgagccaatttatatatataaattgggtcctccagaaaaacagaataaattatatatataattatacgcataacttaattaaattatacgtataacttagctatatatataatttattctgtttttctgaagaaccctactgacacaaatgttgagcatcttttcatgtgcttattggcttaataacttgtacatcttctttggggaaatgtctattcaagttctttgcccattttgtaactgaactattaatatttgtctttacattgttgagttgtaaaagttccttatatattctagatactagagccttatcagatatatttctgcaactattttctcctaatatataggttgtgtttttattttctttttctttttttttttattgagacagtctcactctgtcacccaggctggagtgcagtggcatgatcttggctcactgcagactcgacctgccaggctcaagcaattctcccacttcagcctcctgagtagctgaggttataggcacttgccatcgcacccagctaatttttgtattttttagtagagccgaggtttcgccatgttgcctaggttggtcttgaactccctgcctcaaagcgatctgtcagcctcagtctccctaagtgctggaagtacaggtgtgagccacagtgcccggccatctattttcaatagtgttttttgatgtacacaggtttggaattttgataatgttcaattcatccatttttttttttttttttttggttctttctactggaccaccactcttgagccctctaatccaacctccacgcggcagccagagggagctctctaaatgtaattactctttccctgctccacctgctcaaaacagtgtcacatttgtgatttaaaacagtatttctcaaacctaatttgcaaacaaagcaggtggaactcttcttgtatgcacagcatctgatttggttggtctggcatgggtctgggagtgagcacacctaccaagcggctgctggggtaacttgcgttttccactgatgatttcagcaatgtttccggtcccacatgctcctccagaaccttgtactcccccatgaaaaggtggagtccatttccccttcctttatttatttttttgagacgaagtttcactcttgttgcccaggctggagcgcaatggcgtgatctcagctcaccgcaacctccgcctcctgggttcaagcaatgcttctacctcagcctcccgagtagctgggattacaggtatgtgccaccacgcccagctaattttgtatttttagtagagacggggtttctccatgtcggccaggctggtctcaaactcccgacctcaggtgatccgcccgcctcagcctcccaaagtgctgggattacaggcgggagccaccgcgcccggctatttccccttcctttgaacctgatcaggacttgacgatggcatcaacatggtgagagtgaccctgcatggcttatgaggctgggttacacaaggcgatgttgcttctgactggctccctctcaggatacatgcccttggaacccatcctctaagctccttgggagcccaacttagcccatgtggagacaagacagggagagaaacagaggcacccccagccctcagccagcatcaaccgccagacaggagagcaaatgcgccaacaatgattccagctgaagcctcagacagcgtggagcagagatgagggatccctgcagattgcagatgcgtgagcaaaatgcatgctgtcactgttttgaaacaacaatgtctgggggctgtttgttatgcagcaatagacagctgtaacaatgctgttactgctgtattccatgaatgactgcactttgagtagcagggggctagatcactagataagccccatggcttctgtgtatgctatttttctacttttatatccttttcattcactttttttttttttttttttgagacagagtctcactctgttgcccaggtgggagtgcagtggtgcaatcttggcggactgcaacctccacttcccgggttcaagcaattattgtgcctcagcctcctgagtagctgcgactatagatgcacccccatgcctggctagtttccgtatttttagtagagacggggttttgccatgttggccaggctgatctcagactcctgacctcaggtgatccacccaccttggcctcccaaagtgctgggattacaggcgtgaaccactgcacccagcctcattcactttctttacttggctcatttttccttgttgcctcaattctcctctaagatcactttcctgacatttcagcctgggcctgttgccttctctgggtcccctccgcctcctgtgcctcccccatctcagccttgatccctcagattatacttcctctgtccccaccctgaccatcttggctgtccctggatagggatgggtatcttctcccactggtctgggagatctggaaggacaggcctggaaaagacttggtcactgctggaaggagctcagttagtgtggtgctgaggacagtacgggtgaggctggccccttcacccaaactcccactctcttccatagatttcacctctgtggcccaggccataggattagggcaactccccttaaacatcgagtccatcctccaagctgtccttttttttttttttttttttttttttgagacagagtctcgctctgttgcccaggctggagtgcagtggcgcgatctcggctcactgcaagctccacctccagggttcactccattctcctgcctcagcctcccgagtagctgggactacaggagcctgccaccacacccggctaattttttgtatttttagttgagacggggtttcaccgtgttagtcaggatggtctcgatctcctgacctcgtgatccgcccgcctcggcctcccaaagtgctgggattacaggcgtgagccatcgcgcccggcctcatgctgttcttgaatagtgagcacctgttacaagtcgccccaccagcctctcacttgtacccccctcatctctttctccccaagagacagaggaccctggcacttgtgaagcatgacccagaccctggggccatggcatccaacatcctcattccccatgacccctactgtctagatgtagctgccaagagacccccagactccccgggcctctgtctagagtgccaagacagagagagaatgccctgccgcttgcatgctttgtggggtgtccttcccccttccctggctgctaggcgtgacttcaacgttctccccaacccccaaacagcagcactgacaccagctgcagacctggctcaggttagctaatgaggaccaggctggggatggagcctgaacccctaaaccccagtcctgtaccccaccctaatcctggggtctccactggacaaaacgaagcagcttggtttttcgttgttattgtttttgagatagagtatctctctgtctcccaggttggagtgcagtggcgtgatctcagctcactgcagcctccgcctcccgggttcaagtgattcttgtgccgcagcctccccagtagctgggattacaggcgcgtgccaccacacccagctaatttttgtatttttagtagagacagggtttcaccatgttggccaggctggtctgaaactcctgacctcaagtgatttcccagcctcggcctcccaaagtggaagcggcttatttttaaggagaaaactcccgtggaaaggaatcagcacctcctctgtcaacatttcacttctctgaaaagactctcacttccaacagaaagtgctttgtaacacaacaatgaggctgggcgaggtggctcatgcctgtaatcccagcactttgggaagctgaggcgagtggatcacgaggtcagaagttcgagaccagcctgaccaatatggtgaaaccccgtctctactaaaaatacaaaaattagttccgtgtggtggcgtgagcctgtaatcccagctactcaggaggctgaggcaggagaatggcttgaacccaggagatggaggttgcaatgagccgagatcacgccactgcactccagcctgggcaacagagtgagactccgtctcaaaaaaaaaaaaaaaagaatgagaacatatggacacagggaggggaacaatacacacaaacaaaatttagaaacaggtgaaaataattttagtaatatttttactaatactgatatgctcaaaatattattatttcaataagtaatctaaaaattattgagatgtcttatgttcttttcatcatactaagcctttaatatttggtgtgtattttacactcacagcacatctcaatttgcagtccccatgtttcaagcactaaataaccatgtgtgtccggtggctaccatactggacagcgttgatctgaaatcgcatctgtatgcatcaccagcatatttgcagagatccccatctcagcagcacacctgaggctcatctgcgaaagcacctgcaacttctctacaacctcccacatcacctccaaacacatcctcatgtcatctgcaaacacacccatagctcacaggccaatgcctaaatatcattgcaggcaccttcagagaaagcacttactaaaggggtatacttgattccacatctgctttgacctgcaaatctcccttctcctttacatacatttgcatctcatttgtatgtcaatctaaatccactggcagagcctcagatcatcatctcaaagtcaggtggatgtggggctgggcaggcctccaggtgttcctcctcctgcttcctctggggctcttgatcctcctcctcttccttgctgctctcctcctcctcctccaatatggtgaccagttcctcccgcagcgcccccatctccagccccaggctgcacagctgtcccagcagctggacatccactcggcgcaggttcccctgccagtaggaaggggacgtcacagggatgccaccccagagagcaaggggtctctccaggacctgggtgagagcaggtcccaactcatgtcctggccacagcgcctgggcagggtcctcactgtgcccatggaccctaactgccttcctgcttctcagagtgtctcttgatctctaactcttctctttgtctctccatttcattgtccctgacttctctctctctgtctcctccctctcttatctatatctgtccctgtttccctttgtctctgtccccatttattttttgtctttccatgcccctgtctctctgtctttatgtgttgccatttctctgcccctgcctttggctctctttctctcgcttgccctctctctgccctccccaactttctcaaattcagtctgtctctccatctctgttcctgctctccgtctctgcttcccacctctgtccctctcttttgggatctccctgtccccacctctgttcccgtccctcactctatgtctgtctctcggtgtctgtacatgcctctcatgtctctgcttctatctctcagattctgtttttcgatctctggccttctctatttttgttcatttccattcattctcatttcctctctttctctttcccttccaaacccctcactcaccagctcctccctgatccacagcagactatcgcaggcacctccagtgtctgcccctgcagtcctgagggtctgaccagggatttccactggggagacctccctcagggcctgggggggtgggcccagccccggaggcaccagtccagcctgattcagctgcctccacagttccatcgtctctgagctatggctgcaaggagcaggaagtagcaaggtccagggtggcctggtcccctggggagctgtgtgcgtggtggagagtaaagggcagagggagtgggatgggggttcctgggaaaggtatcccaaagtccactcttcagagagaatcagctggccttgtgcttttctttttccttctgaagtctaacctcaactctgctcacagggttcaaacatagcctcttgcagaggtctaactccacccttccctgcctgtctcaggcctgacccctcaggggcgctcagtgtctgtagatgcctggcaccctctgtccttccacctgccccccaccaccacttctccagcctctcctcagcctccatttgacctctggcttgcccatagcttggtccttgcttgtcctcttggcacgggtcatcctagggctttcccaccagtgtgcctttgggggcaggaatggctcccaggggcaccaagacagcaatcccttagctggagtgcctgtgtccaggctgctggcctagggccaagcagccaattctgctgaccctggacttgcctatgggtatattatccctgttgagggtgagggcttctgctgtggaaaagtctgggaagcactgcaggcctctctcggccttggacccttccttcagacccaaggtgcatatatatacatatatataatggtagatcacgaggtcaggagatcaagaccatcctggccacatggtgaaaccccgtctctagtaaaacacaaaaaattagccgggcatgctgccgcgtgcctgtagtcccagctactcgggaggctgaggcaggagaatggtgtgaacccaggaggtggaggttgcagtaagccaagatcacgccactgcattccagcctggcgacagagcaagactccatcttaaaataaacaaatgaacaatatatatatatatgtattttgttttttgagacagagtctcgctctgtcatccaggctggactgcagtggtgcaatcttggctcactgcaacctccgcctcccgggttcaagcgattcccctgcctcagcctcctgaacagctggggttacaggtgcacgccaccacacctggcgaatttttgtatgtttagtggagacggggtttcaccatgttagccaggctggtctcaaacccctgacctcaggtgatctgcccacctcggcctcccaaagtgctgggattacaggcgtgagccaacgcgcccagccccaagtcccttttaccatagaaagtaacatagtcacagtgcccagggattcacaggtatggggagagggttcgttattcagctgccacacccaccttcctaaacctgctgcccttccagtttcctcacgtgcacagccacgcccgtctgcttttagtttctcaatctgttggcttaaccttcaaaacaggcccaggatttgagcacttctcaccattccctctgccccatccccattcatctcttgcctagactgctacagcagcctcttttactggtcccctgcatccacccttgccctctaaggcaagggtccccagtccctgggccaaggaccagtaccagcccctcgcctgctaggaactgggccgcacagcaagagatgagcagcgggtaagtgagcattaccgcctgagctccgcctcctgtcacatcagcagtggcattagattctcataggaggcaaaccctattgtgaactgtgcgtgcgggggatctaggttgcctgctccttatgagaatctaatgcctgatgatctcaggtggaacagtttcatcccaaaaccatccccaccccacccccgacccccagtctatggaaaaattgtcctccacgaaaccagtccctggtaacaaaacggttagggaccgctgctctaaggtacattctccacctggcagaaataatctttacaaaatgtaaatccgattttgacactcccttcttcccactgtgaatagaataaaaccctaccaggcctgcaccgtcagcccctgcccacctctcaacccagtctcctatctctgtctgcaagctggttcccacctcaaggcctctctgctctagaggctacctctccctgcagcgcttttcccctagatctttgaatggctctttccttatcattcacttctacttcaatgtcacctcttcagagaggcctttgctgatggccctacacccagtcacttttttttatctgcttctcatcaaaattgccttgctgattcctttgtttcttattcatcctctcccacatccatcctctcccagcccagaatgttgacttcctgagagagggactgggtctgtcctgctcaccatggtaacctcggcatctagaacagtgcctgccatcacgtggtaggtgctcagtaaatattcttggaactaatgaatgaataattctatccacaagacttcacaatggctcttcatgctgcgatctagctttcaactccaaactggtcttgagatctcacctcagtctctaaccttgacatctaacctcttcacccactctcttacctgaccctaatttttaaaaatgacgtggtcagcttttcagccccctcattccctgtttttaggaggtagtgagtggaagctggaagaataagaaagcttggggagactgcaattgcagtcaggaaagaaaggtactctgccgggaagaacaccccatcttctcctagggaaagattgtggagtcctggggtttgttttgtttttcaattttttgttttaagagacagcgtctcgctctgtcacccaggctggagtgcagtggcgcaatcacagctcactgcaacttcgacctccccggctcaagtgatccccccgcctcagcctcgtgagtagctgggaccacaggcgtgcaccaccacgcccggctaacattttattttttgtggatataaggttgccctatttctttgtggagataaaggctcccctatgttgcccaggctggtctcgaactcctggcttcaagcgatgctttcgcctcggcctccacaaagtgctgggttcacaggtgcgtgagcccgacctgtgtctcgttttgaagctcagggagagggcgctgtgagcaatccctaaaccctttaagagtaaaaagtgcgtgcacctttaagaggacggttagaaaacgcggggcgtggccacaggagaataagttcgcgctgaaccaggagcgtgggataagaccggccccttccggttacgaaaccttagcaagatggcggctccctgggcgtccctgcgcctggtcgcccccatgtggaatgggcgtatcaggggcatccatcgcctgggtgcggcagtggccccagagggcaatcagaagaagaaaaggacaatactccagttcctgaccaactatttctacgatgtggaggctctgagggattacttgctccaaagggagatgtacaaggtgcatgagaaaaatcgatcttacacctggctggagaagcaacatggtccatacggcgcaggtgcctttttcatcctgaagcagggaggcgcagtcaagtttcgagacaaggagtggatcaggccagataagtatggccatttctctcaggagttctggaatttctgtgaagtgcctgtcgaagctgtggatgccggtgactgtgacatcaactacgagggcctggataacctcctccgcctgaaggagctccagtccttgtcgctgcagcgctgctgccacgtggacgactggtgtctcagccgcctctacccactggccgactcgttgcaggagctctcgctggccggttgcccccgcatctccgaacggggcctcgcctgcctccaccacctccagaacctccgcaggctggacatctcggacctccctgccgtgtccaaccctggcctcactcagatattggtggaggagatgctgcccaattgcgaggttgtgggagtcgactgggctgagggcctgaagtcagggccggaggagcagcctcgggacacagccagccctgtccctgcctagcctttagccctgtccccactcacgtggcttctcagcgggctgcatggaatgtctggtagctcaccacacttctggcttccatttgtcttcactcaacgtcagggtgggggagtggtgctggccaatcacaggagagagcgtgagttcccagtatttattcctggctgcccttggctaaaggtcacagctcctgtcaccctgtcaggcagccctttccatgcccctgttcaggcctggggaggtaaaggctcaggctgttagtagccgcagagagccacactcaccttgtcaggagactcttctcaaactgtccttatgtgagtgcactgccatttcttgcagggaccctgactgacacaggggctactactgacactttacagggatggttctcccccgtgcagggccgctgtgcccactgcaggacatgcagcatccttcgccccactccactcactaaaggccagcgcaccccaggccccatagtattgctggttatggatttattgactttatgttccaaattcagctttttcagttggctgttttttgaaaggggataagctttgtcagtagagggcaccgaacaggcattataggaggaaaggcgcctccttcgtggttcttgttggcctccactgaggcacctctctgggaataacgttccccagcaccccaaatggatttccagtcaattcagaagcattttaccagtgaagccctcattattccagttcactgttaaagccagtaattctctatattaaactttccctgttcggtttatactccggagtataaaccgaacaggcctgccatagaaaatgcaaccacagaaataaaatggattgctttttttccctgtagtgaaaatacatttaaatctatctca

SEQ ID NO: 735301 - DNA, 188402 bp, Homo sapiens
ctccaaggctgagggatgaggagacctgctgaggacccagggccttatctttccatcccactccataggtcccagtattgactgatgctgtcttcacctcctagcctcacttttaaccttctggcacccgcccaccactgtccagttcactattgaagccctgccgtccagtgctgcagagggaaaggatgttcttctactggcctgcaatatttcagaaactattcaagcctattattggcacaaggggaaaacggcagaagggagccctctcattgctggttatataacagacattcaagcaaatatcccaggggccgcatacagtggtcgagagacagtataccccaatggatccctgctgttccaaaacatcaccctggaggacgcaggatcctacaccctacgaaccataaatgccagttacgactctgaccaagcaactggccagctccacgtacaccgtgagtgattcccccatacctctgggtgctggcggtcagttctgcttcacacacatgagattgtcaggcctgggctgtgcctgcatccccctctgcattttgtcccgtgttgagatttgggcatttagtgcaggacacacacatggtaggtaaacttcaacagatcagaattcctttcctgcatccaggccctgcagacactgatggcgggggcgggggggcctcagcagggggaggtcagtctcagccaagcaccccatgccctccccatgaacctgaccctgagaaagaccctggagaactgggtcagggcctggcctgagggcgtcctgggaacctcacaaaagcccagcctcaggactcctgactccgtgtgaccccgggaagcctgtgtcagggctggggtgtggtctcctgggcagggcttactgggagcaaggatttaccagatgtctgcgggctgtggttcctgaagcttctcatcagtgagggctcagctcccagagtctcatctagacaaggacagagcctaccactttccctgggactcagcctggagagggcagggggacaggattactagggcattggccccctgaatgaggagcttaagagatgcccttgggcagtcagtggcccaggggtaggaacagaggggagaaaatgttcctggcagcttcttgtccaccggggatcatgcccaggggtgctctcccatggaggcaaataacagatgctgttgatgtgaacacctcctctgtgccaagcttcatgtcagatcctgtgaataatttaaagttcattcacagacaaagtggcaagcctcagaccattttccatttacatattgtatggaggggaaactgaggcacagagagatacagacaccggccacggtgggcagatcgcagctggcagagtcacatgagggctgtctgcagctgctgccacgtcctctccttcatccctggtgccttactaggtgtctgtggaccttagaacagccactggttcggatgttttcttcttaggtgtctacagctcggagggggagattctggtctggagagttatgagtaaatacagaattaatcagttttttcttaactaaatcacctgcctcaacaatcagtcagtgctggggaagttcaggcctcctcgctcaggtccacaccccgcatctctggacatgaaatggcttcgtgtgttttctgatgtgtgggtatcattccaacaggaggataaaggggaggactttgctttctctccccattcacaccctgcaccagccagggcccagtgtgagacacatactccgtagttctctcatgaaggagggagggaatgaatgaaggaatgatctataacctcttcagagacagagacctggatacaagatcctaggaggttctgggcccaacgtgagacacacactctgtagttctcttatgaaggagggagggattgaatgtaggaatgatctataacctcttcagagacagagatgtggatacaagatcctaggaggttctggccacacctgttttctgtccctctagagcctaagacccatgtctcattcatctggcccgtttctcctaaatctgcccctgggagctgagtctcatctgaccctggggctgcagggctgtgggaaggttttcaggggagggatcaggcttgcgggtagtcccacacgtttgccttacaccctggagctctacctggttctcactatgaatatcccataataatcccccctatcctttctggggagtagaaaaaaagtaaatatttaaaaatatgccagagcatctgttcttcttagcaagttcagatagttattagttagcaggaataaatcgttattttaccagagcctcacctgctgggggtttatgggagcctaactgactgaggggggtgggaaatatccaactccagccccctctagccatcatgtcccacctaaaggagagaaaaaactgagaggcacttgtgacattcacagcccagggcacagactctatccaggaccacagaacccctccctccccccactcaccaccgcatcactgaacgcctgctcacccaagttcctgttgcccagtacatcatgtcctggctttcaacaaaaactacaagacagactagaggcaaaaaaaaaaaaaaaaaaaatgcagttcgaaagacagaacaagcatcagaaccagatgcagatgtggcagggatgtggcagggatgttgaaattatcagaccaggaatttaaaacaactctggggccaggagcggtggctcatgcctgtaatcccagcatttgggaggccgaggcaggcagatcacctgaggtcaggagttcgataccagcctggccaacatggcaaaaccccgtctctactaaaaatacaaaaaattaggcaggcatggtggtgggtgcctgtaatcctagatactcggaaggctgaggcaggagaattgcttgaacctgtgaagcggaggttgcggtgagcctagattgtgccactgcactccagcctgggcaacagagcgagattccatctctaaaacaaacaaacaaaaaacaatactggctaatatgctaaaggctgcaatggaaagcatagacaatgtgcagaacagacggatgctgtgagcagagagatggacaggctaagaaagaataacaacagctactatatctatctatctatctatctatctatctatctatctatctatctatctatatatatgtatatatatgctagagatcaaactcactgtaacacctggatctcagagtggttgtgaggatgtttattaggagattaaagagattaaagcagagttatacacagggcgagagctcaactgatgctatcaactagtattcttatttttttgatgttgttattggcaataaaatcaggaacaatgcagtaaaaatttggttttatcatgtacgagttctgtgaccttccttgacttactgaggtactgtaagtctcagattctaactctgcagatggcggtgatgcccctctccctcaaggtgatgtgaggatgagatgagctgtaggtaggttggtgcccactgtgcctggcacatggaaggcccctgaaaatagtcaatgaacatcatccccgctcatcagcatggagttgacagtgagggctcgctctctgtgacaatcatggaatggaaaagaagaaacaagaggaagactgggcgcagtggctcatgcctgtaatcccagcactttgggaggccgaggcgggcagatcatctgaggtcaggagttcaagaccagcctggacaacatggcgaaatttcatctctactaaaaatataaaaattagcctggcatggtggcacaaacctgtaatcccagctacttgggaggctgaggcaagagaatcgcttgaacttgggagatggaggttgcagtgagccgagattgcgtcagtgcactccagtctgggtgacagagcaagactccatccaaaaaaaaaagaaaaagaaaaaagcaacagagggaagaggtgtgacatgagaggaagaagggatttaaaggtacaggagcagggcgaggtgcaagcacctgtgggagaatgtaggagttggtacatcccagtgtgtcaagtctgagacacagaaaatggtgcaaccgtggagagcaagggagtcagctatgaggacagcccaacagaccacactcaggctctggagcatttccttcctccctgactatgcccctgccctgcaatgccccttatggtttcccttggaacaaacttgggccttgtcccctttgccttcccctttctgcagaaaacaacgtcccaggccttcctgtgggggccgtcgctggcatcgtgactggggtcctggttggggtggctctggtggccgccctggtgtgttttctgcttctctccaggactggaaggtaccgcagcttttccccagcctcctcccacccctaggctgaccccagtcagggaggagggagaccccgccctgtattcagggccaggctttccgcatcctcccaaggaatccttccctctcattccatggctcctcccttgccagctgctgatcctaggctgcctcttcctttatgaatgtggcacagttaaggttgcacccctgagtgctgtcctagttccctaacacagcaaagccacagctgcctggagggaggaagggagggagggagggagggagataagacgggagtgctcagaacctggtaccttctgctgttcattgaatttacccacccagtgaggagggatttgcaggcttgagatccatggtgggggtcctgggcatggtcacgcagtggggagtggcaaagcctggacaggctgggtagggtcagcaccccatcgtgattgatgtccctgaggtgtgagatgggagaacctggacctcaggacctgctgtcctttatgtctcttgccaaggggtggagagagagaggacaaggccattgccccatttcagcatctccaggcctgaaaggagggtctggccatggcagggatactgagttctgggagaatatgatacatgctccttgcctccccatgcccccagctcccccagtgtcctgcacacacagccggccctgctttccctctggggccttgacccttcctctcaggcaaacgcaggtggtctgattccctccctgagtcctcagtccctttcctgggtccctgggtcaatgttctcctcacccggcatctgcctgggggggtccttcctctctggccaggacagacgtgactgcttaaggcctatcctcagctccccgtcctcggccgctcctaccacgaaactgatggagacaggaggccttcactccagtccttgaaaatggagtcccttccttgtcctttattctgcccctaaacctgtgatttctccctgcaccctcatgaataatcctgacctttcctagggccagcatccagcgtgacctcagggagcagccgcccccagcctccacccctggtgagtgtcccttcagcccaggtgtgggagcccctaggcctgccctacggtgtccactcctgccagtcaccccctgggggcctctgaccctttctttggggctgcaaggaggatgtcaggaaacatgacacaggggaccccgactgtcttgttcagactgatctgtgggctctgggtcgtgggtcacctcctcgacctcagctgctcaggtctcccctgggaagaggctccctctccctgattctctgggagctgaggacccctacactctcctgcaggaggggcccaggctctcctcccaccctgctgctcactcctgtctctgtccccaggccatggtccctctcacagatccaccttctcggtaagcctgttccctccccagcccttttctactggggtcccaacagtgcaggctcagggcagggggaccatcaaccccacagcacagcactgacccacctttccccagaacagtcaggtcaaagtgagtgcctccagccaggatccgggcctctctacagggccaggaccacccacgccatgtgctgacccctccccgggaccctctacacctgaggagaaccctggagtccagcaggtgcagaatggacactgggaccatcagtcagaggcccacattaacaagggtgcggggtgggcccagccaggacaggggtcagggtgttgtgtccacactgggaggctgagctcaggggcagagctggtcaatcctgaggggaaatgagtggaagtggaggcagggaagtaagtcctggccgatcagagacaggaaccttccaggctgggcttccgtgaccctccctccctgtcccctgacatctcctctctcccctgcccaggcccctctacccagccccagaacagccactcccatctatgaggtgagtgtgggccatggatgttctggtcccgcaggctccaggggacccaggatctgcccccaccagcacctggctgagctcagattcaggaaaatgcagtgaaaatgagaacaggtggtggtgagcagaggagggaggggcctgggaacagggaccccctgagcacagccaggttcagccccagagaagccctgggtgggcccagagcctgggagatgccagacactgttctgagaaggctacaggggttgaggcctcttctctgtttttacaggaattgctatactctgatgcaaacatttactgccagatcgaccacaaagcagatgtggtctcttaggttcctctgggagctgctcttgtgggttgatggagcgtccccaaagctcccagccctggggacggggaaggacatggagcctgagccagagaaccagctctgagtcctgaggagacacaggcctggggacagggagggatgggagtccctgctgaatatctggagaccctgacaggttgccctgggctctgggtgggccgggacaaaggcctctcatcaccacaggaagcgggggcttgcaaggaaagtgaatgggcctgtggcccacccggggtcaccaggaaaggatctgaataaagaggacccttcctctcattggctctttttctgctcacgggaacttagcagaaactcacctgaaactccgtgtccattctctcccgggtcacacagggaaaatatctccaccttgtctcaaccacagtctctcttccctgggaggcagaaataggggttgggagtcaggctggggtgggccctacacaggaaagggcaagattcacatgagccctgcccagccagccgagcgctcagctgtcctcacactaccccagggaccaaggccatgcacagccccagcctgggtccctctgtgaatgcatgtggggtctcaggagcacagaagatggggccatctgatgtccacaaaaggtgagcaatgcgggagcaaccatgggtggtataggttgcggctgtggcccctacgcagcctccagtgtcctgacccctgctgccctcttcacccaggccctggaggcccagtctatcactgtcctccacaaatgaacttacctgtccccaaatccaggatcctgtgtgcttatacctggccactaggttctcctctgtcccagtggctactgctcaggacatctttatccctggtggggcacagagaggggctgtcagagcaaccaagattaatacagacgcataattcagtccttgagcactacccaggactctggcccctcattgctcatcagttcccactttaccccctggcatggatctcactgagcaagccaactctttacacaggagcatccaggtcagaggtgcaggactcccccatctaaagctcatgcaggctcccatggcgatgggacaacctgtctgctcctctccctggcccacagccctatctcgcctgcagctcctccacacacctgggacagcagttctcagcccttccctgagggcccctggaagggtgatgatctcatataggttcacttgaaccaggtgccaccttcccacaagtgagctggtgcctgcactaaagcacagagccacagttcccaagagtgttctgccactgccacaggtcccaagagtgttctgccactgccacaggttgttcgtcctgagatgagaggtaagaaaacaacccgcaatgggttgttttatatcgggatttgcatcaggatttagctctaaatgacccctgatcccacctgcacacagcgtcagatgagacaaggtgaggcctctttagttttctgttgaggctgtgacaaattaccacaagcttagtgacatagaaacctgaaccaaagtgcccacatggctgtgttctttctagaggctccagggaagagtgcatttcctctccttttccacctcctagaggcctcctgcaaccttggctgtgtcctctttctccatcttcaaagccagcagcacagcatcttgaaactattctgtgccctgcttccatccccacatctccacctcctcccacctccctctctcacttaaaaggaaggagccttgtggttattttggacgcacctgggataaaccacaacaacctccccatctcatgatccttcctttaatctgtaaagtgtcctttaccacgtgacatgtccacagatctggggatgaggatgtacacatctttgagaggcccttgttctgtccatcactcctctcaaggccatcttctcatcatcgttcactacaaactacacatgggcacctggatgggttcatcatgactgtggcgtcagttcctgcattaacatccccagcaccctccagatcctgagagagggagacggagggctctccatgcccctagtacctctccaccttcttcttggtgacatgcttagttgctaagaataacagaaagcggaggtgactgaaagatcacaactcaccggcccttcaatagttcgtggacatcagcaccacggacagtgactcagtgaggctaatttccaggtggcagcagggagcatgcagataggagggaactgcaggaaaagctgcccattctattctatatgagaaagagtgtaagaaagaggaagctattacagggataatgctattcttctctaatccataaattgcgaaacctttgcatgtctggatatcatggtttttagcacatctgctgccactccctgcagggctgattgctgcatccaggatgtggtctcttggggggctcacagcctgctttggcctcatggtgagtctccctgcccctgacactcaggccactgtctctgcctacaacatggtgggaaccttccatgattaacgtctgattctctgtgcctgacctttgaagcacatccatcactcagcctggagcatccgctgagctcagcatcctgctcctccatccccagctgagcccttgaggagatgcttgagaggatctcctgggctcctctgtgagctcctccaggctgagccttgtgcttggtgtcagaggcctttgccatctgcttgttctttccataggcaaataatcctcctcagggacaagtggggcctgaagatctgtctgaatatctatctatctatctatctatctatctatctatctatctatctatcatctatctatatgtatgtatatatgagaatgctttattaggcaaaactgcatactatgaacatgctttaaaatgcaacaggatgagatgtgaagacataaagaacaagtgtgtagtgacacatggctatcagaacacactgaagaatccacaccgcggccgagagcagtggctcacgcctgtagtcccagcacttttggaggctgaggcaggcagatcacttgaggacaggtgttcgagaccagcctgaccaacatggtgaaaccccatctctactaaaaatacaaaaaatttagccgggcctggtggctcatgcctgtagtcctggctgttcgggaggctgaggcaggagaattgcctgaacctgggagacacaagttgcagtgagctgagatcgcaccactgcactccagcctgggagatagagtgaggctccatctaaaaacaaaacaaaacaaaaagaatccacactgcttccccgcttcactttacccagaaaaggaatgttctaggccacttcctcttcagcacacatccccagggaactaaaataggttcacagtcacccccatcttcctcattcccatcacctcttacccacagaggcatctctggtcctacagatccagccctgccttcaagaggcacaggtccaacccatccagtgtccctgctagtcacacacagcactcagggtacaatggagggcttctgtgctttggatgggaacaaaccccacctcacattcccacacctgagaagccaccagggtcctctctgtcctgtcctcacactcaatgtctgtcctgggtcacccttgtcatctctcctggaaataggcatggctcctgacaggtaggattgaggctttgtcttttcaggagtccctcccactctgagcacatgaaactgctcagctccatgcaaccctctctcaccaggggccttgttctctgggtccctgaatacctgggtccatgccatgtacattttaagaaaaatgacagtgactctcaccctgacatcctcacccaaggcacgtgtctgacaagaatcaccaggtgagatacctgtggctccacacacctgaggcttcactgcgcaggggtgtcctcatccctctcctcccacccctagggacagtaagcaccacaggctgccttggaccaccagctccccctcccagacacagcctcagatctatactgacatgctacatggagaggctctgatgaacagcaggtattaggaaatcccaccgaaccaggtgccacttgcggccccactcctcctcatatctgtgactgggacagacacacataacacacctctgttcaccgcccagcccccaaggtcaatcacagtctgcttctcccctagatccactgctccccatgtcttccgtcctcagctgcatcctgggtggcctccttgctgttcttgtaccccagaggcaggttccaacctttgtgatgttgcctgcaatgcccaaactttcccttccccttccccttcccttttcccctcccccttcccctccccttcccctccccacccctatcccttcgtcttcccttgtcttcccttcccttccctataaagccaaacatacccatccacctaccttgtggtcaaagtcatcagcctcctgctccactcagtgttctctgaccctgcatatggaggtggtggcccctcctagaacacccaccactcactgtcagccttgcgtggtaatcacagattttgcaggggttacctgtgttcaggtgtgtcacctgtggaaccagaactcttggaaggactggcagagggagctgcttaggatatctcagggctcctggcatctggtctaccacagggctattaacaacagcacttagggacaaggtggaggatggacggttaagagggtaaatatggatgatgtgtgggcaaagaataggacacaggaacacatgcagtactcaaataattatgccaagaaaggtgaggacatggagatggacattcccatatacttctgatgggactgcagtttagtccctacagcaacattgacctcatcatgtttaacgcgcacacgctctgaccactatcctacttctgaaggcctccctgtgctgtgagctctgagaaggccaagcttgcctgttctgtctctgctaaagccagagaccagccaatagcccagcacagggtacttcataaatacatgttgaaggaatgagctccaggaacagtactccacatggtagagatgtgtgtatgaggatgttcactgcagaaggtcatgtcaatgtgacaagtgacgagcagcctcaaatccagcaacaggggtgtgggtaaaagatcatagtgtagccatgcaatggaaccaatgaaaaaaccacaattagagcaaatccacatgtattaataaaggaggtgccctccatacatgctgcacctaacagaatgttgccaaataagaatgaaaaatgatgatatttgggctgtaaaaactagaagtcagctaaataagaatgcatcgaaagtatttgtgaatgcttacaattttataatgccttggcatccgttttggatggaagttggactttctcataccagaagcagggctcagtcacctttgaaatagtttccagttctccacctccttccagttcctcagtgtgattgatcagatatctgatttatacaactgcctcctggtgacctcctccctatgggacttccggatacagcccgtatgactgccccactgaccccacaccctgcctgctgcagtgaccacctctaattacctggatctcatgtctgcttgcattaaatccaccaattaaaactccctgaggacaatctgtttgaataatattctgtaccctaataaaggccttgacccatgggttccccctctgtcctccccatactgcccctgacctctgtgtgtgtgtgtgggtgtgggtgtatgtgtgtgtgtgtgtgtgtgtcctccagacagggcctgtatcccccaggacctgtaagtaataaatctttattttcatcttatgtctctcgcaatcattggcaagagctctgcatcttaaagatcgcaaatttaagaaattggtgtagtcggcacaatagagtacctcttctgtttagcacaagatatctcggagctgctgaggcttttaacatcctcgccggtgtggctgcctcactggtgaggccgttctgttcagtgcaattcagttgctccactgtgtgctgctgtgttgctgctgtagagtgctgccatgttgttctccccaaattgttaccgagtaggaacctgtaatgtgctcccaaggtggtctaccccatgagaagggggattctccatctagggcaagggctaggtgtgtttctggaatcctaatagggaaggcatccacagagggtgaactccactcctccttagagtgaggagtgacatttcccatttattttccccatggaggtgccatgtattgactttttctttcactgtcccaaggttgagccaaggtgagctatggagaccagggcaagataccatttctgttagcaaagcaaatgggtgacaacgtgtggagaagctgtggttctcctgatggatatagcagagtgccatttagtaaaatcttgtcaggaggctgcccctggttagaccggcagtgtctgtagtcactaaggtggatgcgaattttaggccctgggccatggataatccctgcagacacagccgtggcttcatgtgatggggcaatcccgggctagtggctcccttgtttctgcatttcttgctgtggttgcacaatcaacacctcaggggttgattgggtcaccttggaaagagaaacagctgcctaggaggctggtgcacatggaggccaccctcaattttattctgctaacaagttgtaagattaaaacaacagggggctttgggtaccatcaggaacttgtcaagtaaacatccaaagacagaaagaagaaaaagaaaaagacattaaccgtctagaaatacaagccattttaaagattttgcttaaaagatgcgcttgggctgggagcggtggctcacacctgtaatcccagcactttgggaggccaaggtgggtggatcgactgaggtcaggagttcaagaccagcctgaccaacatggtgaaacctcgcctctactaaaaatacaaaaaattagcagggcatggtggcaggtgcctgtaatcccagctacttgggtggagaatcgcttgaacccgggaggcagagacggcagtgagccaagatcgcaccactgtactccagtctgggcgacagagtgagacttcatctcaaaaaaaaaaaaaaaaaaaaaaaaaagacgggcttgtttcgtcgttgtggagtcatcccagagagaggctactccctagagtcactgaccacctttcctcctccatcttttcctcttatcattctagagacagaaaacaagaatctcagctttaggtggctaacctcaccccccaagaaaagaaactaccactttgattgactacaaatccaagaaaaataaaagagaaactttaaaaagtactgagcaaaccacaggtctagcaaacataatgctagccctaggttacttattcatttacaacaaacccctagatataggaggaaaaaataaaaggtaattaaatatatacacatacaatattttaatataaatatataataaatagttaaattatgtatgtataatatgtaactaaatcaaagtaaaatttcatactttgattctattggaaattcaaaattcatttattaacttatatattaaggaatttatgtaaaaaaagatttttaaaagggcaccaatttgcttttgtgtctctacaacataggatctaatttaactttacatttgctaaatacactaattgacaaatattcatggatttaatcaatactggggctcaaattgtagccacacgtgggaatcccataaatttaaacactctgtccctattatcttgagaagaaaactaaatataaaattgaaaaaaacaggtatgtctcaatttacctgtaactttgcctaaatttcccggagtcatatacccattgctgtaaaacattctctattggacataggtgctctgagacaataaataaaatagaagtgtttttggtacttagacattggcttgacaaaatgggatcccatgaaacctcagttaagatagtgaatacggcccaatgtgagttgaaatggggcctttaaggattaaaacttattacatgaaacctagtaagtaatggggtgattatccatactgcttctccatttcatagcccaattttgacagttgtcaaatctggaaaaaacaaacaaacaaacaaaaaaacccctgggaatctgttgcctcacagagacacaaagtagacatcaaaattgtatatctcagttccagttccaaaatggtggcatagaagcaagctggctttactccttcacacagaaaaccaaaaacaaatatacagcaccaaaattattaccagatatattccagaactcaaatatgaaaatgaaacagttttcagagccacagagaagtgaaaaaaactcccgacagatgacaaaagaatcagatttccccatctgtaatgtccctccctgccccattctgcctggtaccaggtgtgtggaaaattttaccccaactcatggtttctacactgggaaatgtaagatcaatgcgggcaaccagtttctgcacaatcctgggttccctgtccctgccttaacccacaagaagcattgtgagtgcccgaagggagaaatttccctgaggacagtcaaagagtggggaggcaggactaccatctccttccctggaaactctgctgtgtaactcagccaagggagacatgaaatcagactggtgtttcagcagctccatgttgtagtaggtttgtttcacaggtatcctgggcatggacatctagccagctttcccacactgccaggatatcccctttgggacctccctcagttaggaagggcacactctgatcatttactagggccaaggtaaaccctaaaggtaacttagagatgaaaaggaggtagtgacctagcagtaaagaactctaagaaaatctatccaataaaaatcaaaacaagccagacaaagactaaaataaataatgaatccttcaatgtaaagacctggacttacatccacaagaaacagtaagcaggtaaccatgatctccccacatggacaaagtgaggaacaagtgactgatcctgatgagatggtgatgtgtgagctctctaatcaagaattcaaaactgcagttttaaggaaactcaatgatcttcaagaaaacatggaaaagcagttcagaaatttatcagagaaatttaacgaagggattgaaataatttaaagaaaacaaacaggaatcttggaattgagaaatatatttgctgaacaggaaaatttattagagtctctcaacagcagaatggatcagaggaaagaatcaacccaaataagactcccccaaggcataaaataatcgaattctcaaaagtcaagggcaaagagaagattttaaaacagaaagagaaaagaagcaaatggcataaagaagctccaattctgtggcaacagattttcagtggaaatcatacagaccaggagggagtgacatgacattctcaaaatgctgaaaaaatattgacatttgagaatactttatccagtgaagttatccttcaatataaaggagagagaaagtttcctagacaaacaaaagctgagataattcacaccatcagactagtcttcctgtaaatactaaagggtaaatactaaatacttcaatgtgaaagtaaaaaaaaaaacactaacatgcaaaacaaccacaacaacaataacaacatttgaaggtataaaatccactggtgaaattaagtacgtagacaaacccagaatactcaaatagtaattgtggaaagtaatccaatcataactctagcatgagtctcaaaatataaatctatcaaaaacaataatacattttaggaggccaaggttggcagattccttgaggtcaagagttcaagaccagcctggtcaaaatggtgaaaccccatctctaccaaaaaatacaaaaatttgcagggtatggtagcacatgcctgtcgtttcagctatttgggaggctgaggcaggagaattgcttgaacccaggaggtggaggttgcagtgagctgagattgcactactgcactccagcctgggtgacagagggagactctgtcttaaaaaaaaatagctacctgtttggagaaaggtaatataaaatatgtaaatagagacaaagtcaaaatttgcaaaggatgaaattaaagagtagagtttttttggggggttttctgtttctattattttatttgtgatctaagataagttgttaccttttcttctcttgaagatactttgttatatctatgtttttggaagtcttatggtaactgcaacgcaaaaaatctatgatagatccactgaaaataaaaaacaatgacttaaaacatactaccagagacaatcaaccacaaggaagacagtaaaaaatgaagaaaggaagaggggagttacaaaacaaccagaaaacaggcaacaaagtggcagtagtaagttcttacttaaaaatattgaacactgaatataaatggactctattctccaattaaaaggcatagagtggctgaatgctgcctatatgctgcctacaagaaaccacttcatgtaaaaagatacaaatagactgaaagtgaagggggtggaaaaagatatttcatgcaagtggaaaccaaaagagagcaggagtagctatactgatatgagataaactacaaatcaaagactataaaaagagacaaagaaagtcactatgtaatgataaagcgctcagttcagcaagaggagatgccaattataaatatctatgcatccaacacttgagctcccaagtctcccaagtatttaaagcaaacaatagtggatctaaaaggagagatagactgaatacaatattaattaggggactttaacaccctgctctcagcaatggccagatctttcagacagaaaatcaacaaggaaacttcaaagttaaactacacactagatcaaataggcctaactggcatttacgggacatttcactaactatctaactgttacagaattcacattattttcatcagcacatagaacattcttcagaacagaccacatcttaagtcccaaaaccagtcagaataaattcaaaaaagtttatatcacatcaagcatttgttctgaccacaatggaataaaactacaataaatgaataactttctggacacatacaacctaccaagatggaagcatgaaaaggcagaaaaacccaacaaaccaacatgaaactgtaacaaaaggaaaacccaggaccgaatgacttcactgctgaattctaccaaacatttaataagaactaaaaccaattctactcaaaatgctttaaaaaattgaagaggatggaacactttcaaactcattctacaaggtcagcattatcctgataccaaaaccagacaaggacaggacaaaaacaaacaaacaaacaaacaaacaaacaaacaaaaaaacactacaggattgcttgaggccaggagtttgagatcagcctgggcaacatagtcagaaccaatctcttaaaaaaaaaaaaaaagaaaaaaattagccaggcatggtggcatgtgcctttagtcctagctactcgggaggctgaggtgagaggaccaattgagcccaggaggttgaggccgcagtgagccatgtttgtgtcactgtactccagcctggggaacagagcaagatgctctctcaaaaacaaaaagcaagctgggtgtggtggctcctgcctgtaatcacagcactttggaaggctgaggtgggagaactgcttaagcccaggagttcaagaccagtctggacaacatagggggactccatctctcaaaaacaaccaaccaaaacaaagccaaaaaagaacataggccaacatcactaacaaacatagatgtaaaagtcctcaataaaatattaacaaaccatgtttagaaacacatcaaaagagatcattcactatgattaagtgagattcatcccagggatgccagtatggctcaacatatgcaaatcaataaatgtgatccatcacattaaagagaaccaagaacaaaaaccatataatcactccagcaagtgcagaaaaggcatttaataaaagaatgggttgagggagtggagcccatagtcagagcagcagtggtctgggattttggaagtagaaagaagggcagcaccactggccaggaccaccagggaacacccccataggccctgggtgttgtgctccagggagggttccctctggagttattaatcttggtgtccactttgcccagctgcccctcacagggtcagggaggatgaagggaaagcttccttctaatgaaagttcagggactcacagttcctagagcctgtagggagaggaagatcttcgaggaagagcacctgggcattggggcgtttgagaggaagatctatgccaggtccaagtggacaacctgtggactctctctccagggacatacgggtatctgggaatctcctgtagcttaaagaggtaaagacctctccctttagcctgaggactggaggatgctggttcaggtgaatgagtcctgcaggggctggtacaggcctggagggtggtggtgtccagggccttgggttcacccttagcatgattcaggccgggcggtgtttcacatgagcaagagggcctgggttcattgcttcaggacaatggtgaaatctcatggtggaagaaatcttgtccttgccagtgcccagctttcatttggtcttggcccagagtgtcctccctagagaagactcttgtcccttcttcacactgcccttcagggatatgccagccttatgggataagatggggtggagactgtagatgtgggtgggaatctctccacagagtgctccttctctcagcggttgcaccttgtctcagggcttcagcttgaaatctgggatctccaagcccttccctccccagtcctggccaggaccacatgggcagatgcattgtgtgaagtgcatttcatttggggtgtcctctctgcatggcaccctcccgttgattctctttgcgcatgtcagagtgcaggcaccatccacacctcctgctggaggagggacggagctgttgactcctgagagctgatcatgtgttcccaccctcacacacaatcatggtccatcctctgagggacatgtgttgccaccactgtggagatggtgcaactgacagtaacaaacagtaaaatctggtactgaatgggaccttaagccaacaatgacaatgtcattccaaggtgtttcatttttattgattcaatgcaagtcacctgatttcattgactattcacaatagctcgataaagtaaatgcatcatcaccaccactttaaagaggaaaaaggtgcttgggcagtttgtgactactgtggtggctgctgcattgctctctggtaaagccaagtaggtggtgggtgcggcctctgggctgggatgatccaccctcctggtggtggcaggggagccaagctggagccatggcctgtgcagtggtagcagctgaactgaccgctgctgcaggatttgcaagctgttacattttgcgaagccatgaagcacataaaacctcaagtagaacaagtgtttcaaagtctaccaaaatctgccttcagagattattactacagaggtggatatgaacccaaaatgacaaaacgggaagcagcattaatactagataatgaatgaacactagtaatagtagggtaagccctactgccaataaagaaaaaaataagagatgctcattaacatgttatgctcttaaatcacgcagacaaaagagggtctccttatatagtagccacaatcaatgaagctaaagatttactgcaagatcaagctaaaaacagtaggtgtataatgaatttttaacttcatattagtttatgtatatgaatatcaagtttttataataaaatgcctccaaacaaagaatatttgatttagggtttaataacttctaagaggggactcagatgtttcctgtttcacagtcagtctgagagggtcatttttcctggagctgacctgggtggaggcctcacactgatactccccagcatcctctctcctgatggggtttatgctgagcatacagtggccctgggacagctccattctctccatgagtcacagacgctggtcatggaagatccactggataaggttccagagtcatctgtggggcaggtcaggatcacaacatccttttcttctgtgactctggtgttgctgactcagatggggtcggagccactgaccctgtggacaatcagtggaggtgctcaactgaaagtgggctgagggcacgtcttctcctccatccctgggtccttaaggtaactgtggaccccagaccaactgacacaggagctagaaagaaattatttaggaagttagtgagggtaagagcgtccttggcaaggtttcccctttaacaaaaagcagcccaagataattccttttctaacaaagagcagcctgaaaaattgagctacagatgtagatgagcaagatggaagcttgcacaggtgaattccagtaggtgtgccaatagaaaagggctgcctggaagccaggtatgttcaacatggagactccatcctcccttttctccattaccacatgtacagtaaaaaaccaggcaacatggcaccggccaggtagacaatccatctgcatgacaaaagatcagagtggggcagccagcaaatggcacagctggtctaaacaatctttcaccccctgtataaatcagacactgcctcctgaagctcatctataaaaccttctgcatttcactatggaagtggcaacccattttccccaggacccctctctctgtgcagagagctcttctctttctttcccctatgaaacttccactcttaacttcactctgggtgcctgcatcctagttttccatggccatgggacaatgaacctcgagtattaccccagatgaatgatgctgtttcacaatcactggttcagctcccttcttcttagggtttcacagctcggtggggagaataccacgcctcagtggtctggggagtgaggaacaaatgaagaattaatcagattttacttagaacgctatcacctgcctcaaccatcagatccatgttgggaatgtccaggcctcctctcttagatctatacccacttcactggacctgaaatcctgtgtttcccgatgtgttggtgtcactcctatgagaggataaaggagagaactttgctttctctccccactcacaccctgcacaagacagggcccaatatgagacacacactcgctcagtagttctctcatgaaggagggagggagtgacctcgagtgattctgccatctgtagtctgtgtaccctggccagtggctgtatcttcatatgcctcagtttcccctcagtaaaataggacacacaatgagaactaaaaataaaattctaattccccagtgaactgaaaggatggcctcttggccaagcggatcccagagttcctgatcatgacaggatgggaggttacacctcattacagcccctccctttggaagtttagaggtgacaactgactagcattaacgctaaaatcgagatcatgagactgacagaacagactctctgtggccataagataccaaattataaactcaacctaaggtcatgcaggcaagggctaagccacactttcctacatttaaagaataagctatgttctaacacagaattttctttctctctagcggctaaagtaacactagccttcgagataagcaatattgaaatgatcgcggctcatccaccaacactggctaactgacccctgttccaacagccacaactacacttcaattggacaggagactgatttcagtaactttctcctaataagagaccactgagcatggcctggttctgctggtatacagacacggtgcactgagtaccataatgcttgtttcatcttttgatgtataagacctaatttaatacatttaaatctgaattctccaccccaaagtgaacatggggtgcatgtagcatgcatgtttgttgatcacgcatgtgcgtgtacttcctttgtgagtatccatagctccacctataacctgttgaatatgtatacctggccaactcattcagcataaatctatcttccacattcccctcccttgaagtgcctgctattggtctctgctggaggctgcatcttctaccctggggaatggccagcctgcaggctgtaaccctgtgtaagaaataacctggttgggtgcagtggctcacacctgtaatcccagtggtttgggaggttgaagtggtagaatagtttgagctcaggagccagagactagcctgggcagcatagcaagatcctgtctcttaaaaaaattttagggaggagagtgaggatcagaaaaaatacctattggctattatgcttagtacttggatcatgaaataatctgtataccaaacccctgattacatatataacaaacctgcatgcgtatctttgaacctaagataaaagtttgttttaaaaactatctgggtgcagtggtgcatgcctatagttccagctactcgagactgaggtgtgaggagtgcttgagctcgggggattgaggctgcagtgaattatggtcccacctgtgagtagccacttcactcaaacctgggagacagagcaagaaccggtctctaaaaaaaaataaaaatagaaaaataaaatgaaaaatatatgaaataaagtctcctttccaaacgtacagatctccgatttttctgccaacaatgataaatggtcagtggcttgccatgttgtctgtgaattacttttaaaatattcacgatcacctgacctaaaggttggtaccaaggaaccgcctgaatacaccgtctctgattatttgcctccaacagagtgttccctgggcctgatctctggtggacaatgagctgctgggaacatcctctcttctctattcctcccctggggatgctgaccttcccttggagtctcctaagttccccagggcagtcggctaatgtcctagggagcttacctgtcttctccataccaagtctcatgtgaaggacgaggctttgcccttgcccagatgaggctctgggggctgagccctggctggctaccagctgcaagagccatggcccttggacagctggtaaatccttgttcccagtcagccctgcccaagatgcctcaacccagccccggcacaggcttcccagggtcacatggagtcaggatcctgggacaggggactggacaggggtttccagggctgagtttctgaacaggggcttcccaggggtcccctcactccaggatctgacatggtcctacaaggaacgtccatggggaggggacccaggagggggaactgacactgacctccccttactgagcctccccccaaccccatcagactgtccttcctctgtagcaagtgcctgcagggtctggatgcaggaaagaaattctgatctgtggaagtttgtctcccctgtgtgtgtcttgcactaaatgtccaaacccccaaatgggatgtaatgtagagggggacacaggcacagcccaggcctgaaaatcctgtgtgtgtgaagcagaactgacccccaacacccagagctcatgagacatcactgtgtacgtgaaactggccagttacttcttcattcacaagatctgtttttatgacttgtagggtgtaggatcctgtgtcattgttggtgacattctgtatcagcagacatgtattggggtatattgtctctcagcctctgtggcaggtcctggggtaattacttgagttcctagtacatatcctgtaattcccctttgtaccagttgtagccaagcctaaggcagattgtgggtgagtggaagaatctccttgccttctgcagcttcaacagtgacttgggcagtggtaggcaagttccagaaagttaaaagtgaggctaggagtggggagagagcatcagttaatactgggccctatgcattgaggtggaaagatggggccctaggtcctggacaggtctcttcatccctcagccttggagtgtgtgtgtgtgtgtgtgtgtgtgtgtgtgtgtgtgtgtgcgcgcgcgcgcgtgcgtgcgtgtcctactgggccaaggtcagcagcatgacctcccttccttcagtgcctctgaccttggcatttccctgtttggagtccttttccccaggggtctgcctggctccctccctactgccttcaggtcctgctcacattagggcatccttgggagaccccttccctgacacctctagagaccctgggtcttccctttctgacctttcgctgctgtgttccctccagggctcttgtcaatacttgacctcacattctagatacccttgcatgtctgtcttcctccctatgagagcatgagctctgtgagaacagggacttgtgtgatcttggttgcaccccagtgcctgggacaggctgcggactcctgtggatgagctcatgagtgttcccagggcccttcacaacgtgggatttattttccaatggctgaggttgttggctaagagctctgttggagttcaatcaggctggtgggaaaaatattagagatagttatagagatagacacaaatcttcttggaagaccaaaaagtttgcataactttggtaatagatctgactgaaggtggtccctttacctttagttaaacaaattaaagtagtaacaaaggaaggcagagtagtttgtctagccagcttgtttactcatgtgatcttaagactaaccattgatgtgccacaggtgcttaattgctttctacttgggaagtccacaatgtcaattaccctctaacggtgttgactcaagcctttgttaattaatcttactgaataaatatgagtctcactagctgatcaaggccatggtcacaactgtttataggactcagcagggagtctgtaagcggccctgacagactcagctggactggcaaagcaaaatatgtgtgtgtcagtgtacactattcacccgtcccccacagctggtgcccctatatgaggagtgctgccacagagctctgtttagtgtcccttgttttttttcttgagtattaccccaacttaaattgtgattattgtcatctgttttcaacattaactgctcagtgatgattcacttggaaaacattaacaatcgagattgtttcttcactaacaacctcagattatttagattttcctgttgtaatcccttcttcctgtttagtgtccaacagaagccctctgtccctctcaggtccccgttctctccaagaaaccccagccagtctctgtgctccctcctcccatccactcccagggagccctcccctcacctgtgagcagaagcgcctgccagggatgtgcactctgtgaggaggggctgagggaggccccatgggctctgctgtctgctttgtcctcctctgtggagaggagcttgggcttcagaaaataaggaggccagaaagtaaggaacaggctgagaaataatggggatgtgtcgaaaggtcacagatgccaacatctttgtcctatgcaatattatccataaaattacaggtttgagatatgcttaaattttcttctaacatgcattaaaataaacatataacttttaatagttatattaaattgtatttaatataaattaaatgctcttgtcagagctactgtgactgtcagctctgctgtccttcctctctctgtgctaagcctcctcccagggcagaagcacttcccagggccaggggtgggggcggggaaaggtaagtggcaatgaggatctgcacaggtagcctttccgcctcctcccctctcagtcctgcctccttgtcttcttttcctctttttctccaatctacatttcagttccttagaccacgctgtgagaagcaaggcttattgggacccccatcccttaacaggatgacctgtgctccccataagtgacctctgctgtgtctagggattggctctgtcagcacctcacagagagtccctggggcccccaaactcagtgttattttctctatgacacagaaacccctctgggtatgcaaggttttcctcatgttttctaatgtctgggaaggttggatttactcccagcagggaggtcacagagatgtccagggagtggggtcctagaaatggacaaatctagagctaaagcccaggtctacgattttcagttgtttttttctgcagtgctatgtgaccctaatttcctaggagtaactaaaatgcaaacctcagacatttgtagacattttatgatttttctctacagcttgtaccactgttattattatttgctttatgctttttcctaaataaatttactttacaaaacatccttgtcctagtagggtgcaggggctcacgtctgtgatctcagctgcttgagaggttgaggtgggtggattgcttgaggacgggaatttgagacaaaacatctttgtcctatgcaatattatccataaaattacaggtttgagatatgcttaaattttcttctaacatgtattaaaataaacatataacttttaatcatcatattaaattgtatttaatataaatttatatacaatacatttttatataataaattatatatataaatgtatatataatagtttttcttttttgagatggagtctggctctgtctcccaggctggagtgcagtggcacgatctcagctcactgcagcctccgccttctgggttcaaacgattctcctacctcagcctcccgagtagctgggattacaggcgcctgccgccacgcccagctaatttttgtacttttttagtagagatggggtttcgccatgttggccaggctggtctcaaacacctgacttcaggtgatatgccgcctcggcctcccaaagtgctgggattacaggcatgagccaccatgcctggcctatatattttatataattatataaagttttctataataaattttatataataatatataaaatggatatttatttaagataaagttattagttttatatatttacatatatttaggaataaatgtgttactgtgggagcccagtgcccaggcaggtagtcagtacatgatggttgtcattagggttaatactttggaattctggattttttcccaagagagtgtctacgctggaatattgggcttgtggctttctgctgatgtgcatgtgtgaagaagctacttccacttattaggacttgtgtatctgtctcgcagtttcactacctattttctcgtgatgttggtcaagtcgcctaacttttctgtgcctcatttacctaatttgtagaatatgggtaacagtacacaagtgtgagtgtgtatttcccaggactgaccactagagggcgtgaaggcaccggcacttactattacagcaatgggtgtagtagtgctcatggtcgtaaacatcattctcccatgaaaggaaccagggcttcctgggagaaataactgattccagggctggggccggaaagcacaagcggagcctggagcatctcgtgaggccagaaagtaaggagccggctgaaaaataatggagatctgtcgaaaggtcacagatgccaaccagaaggagctttgaatgaccaattttgagacaaaatgagcactataagaaataatgatagtaataaattccaacccataaatacccatgagttcctactaatataaataaataattgaatacataaatatataaggatgaagaaacagctttttcttacagcagaattccaattaatgaatgtagaaggaatgatcaaatagaaaatcactatttggctaacagcacagtcaattgtttgtaggcaagaattatcaatggactttaaatatgaatgggtaaaagtatgatgatgctacaactagtgagtaccaagggggaaaaaaaagtacgttgagaagaaacaggctacttccatattcccaaagtatcacttcaggagctacttattgattataatgggacaaatagtaacttacagtagagaaacctggcaacagagtctctccgaggtacaaaggctctcttcaggaaggaggtaaggggaaggaagaagaaaacactgtcctgcctcaattatttgctttccccattctcaagtgtacttcatagacattcaaagatatgtgttgatagtgtccacgatccacatggctctattatagtcatttattcacacatacattcagtgaggctttgagtgcctaatgtgtgcctgatatttgctagatggtggatgctgagaagatcaggtgtgctgctgtctctagggtgactgaatccacctgccccactttacagatgtggaaattaaagtgaaaaggatttataggattagttcactgtcacaaggtcactagccttaaagttacaggagtaaagcaagtttcctgacttgctagattttctgctgcaggtgctgacaatggtgagctccaataggagagaggacactcagagtgaagtgggagccctgaacaccctggattagccaagaggacatgccgggtccagctgtgaccgcacaaaggaccattggggatatttgtattctctttttcacttagagcttgaaatgaggaaaactaagtgcagaaaaccaagagtggaagatttttcacaaagcactggtaacatgcatcagaaaaccctgtgctgatgtctgtcacggtgtttctcactgaacggtaatagtctggctttgagtgtgttccctctacagcctggagttctgcgaggcagggaccaggtgtgattcatctttgtctctccagtgacagtacacagcaggctctgataaatatttcttacaaaataaaatggaataaaaagtagacatctgcacaggtgtgggatgactgagcagcagcagaagcaggaaaagtcagcgtccccagatcagctgatgtggtgttcggattctagataggggtgaggtgccaggatggggatgggggtcctgtggctctgctgccctgggggacacccctaggtttcacagtgcctgctgtggttgctgcactttgcttccccatgggaaagtgatcagagggtgtggggcttcaggtgaccccatgtgggaaatggccaagggaaggtggggtgggcggcacatggttttttttaaccaatatttgaaggtaggttgtatgaaaaggtgttaggcttatttcagcttatggggagtaggacagggattggtgagtgtgtatcaggtatattttggctcaggatggaaaagaactgtcacagtaacataaggtcttttgggaaattacatgtttactggcagagttcaggccagggctgggtgtctgaaaatacctgtcagggtcacttttatggttacaagggcagagcttggcttggaaccaggtttcttactaataccacatattaagtattataaaaactgtcctttgcaataggacattgctctatgatgcaggttgaggtccctctgtttaagtaattgtgggtggctgtgattctctcatctagtctgcgacttggacttcacctccatctgcagtccctctcctttgctgttgacactggtcagagttaagcgcatttactgacgatggtcacagggtggcagcactgcctctctggtattttctaaaacctcttcctggaactgagccagtctaagaggatgtcatgactaagaaaagggcactaatgaggtgaacagataattttttttttcttgtttctcctgtgaagtaacagagtggaggtgagcatggaataattgccttttagaaatggaagacaatggagagaagtgtttcgcaaaccttaatgtgttcacagatcccacacagatctttttattcaatacagattctgatttttctggtgaggcctgagattgtgcatgtctaaggagcttttggatgatgccattgctgctggttggcggaccacactttgagtagcaaggctcgaagatcatttagaggttaattctcactgcatctaatttatggatgaaaacaaaccaaggtccagagagagcatatacagcttgcctaacaaagccattccctaagtgcctgacttcttgcatttaaacccagggcttcagcctttgtccagttctcactccacacatcacacggtttgttcactgttgtgaacgacagttgtggcagcatctctttagtttaggaatccagagccccaatttcactaccctctttggtcttggctcatgctgtgacttcgaatagttttgcccttacttaaaatcttcagtggctcttttgtaatcacaagatcaagttcgaatatctctgtctagtgttcatggctttataacatatggtatctctttagtaaccttacctaacttccctgttttaaaattgtctcttgctgccatagccctccttgctccttcctgctccctaacaaactgtgttcacttctctctcagtggtagtgatgatggcatggcctctgatgttagactcatgtaacttctaatcccagatccaccaccaacattggcaagttgattcatctttctgaggataagcatcctcctctgaaataaacttagatggcggttgagaggggtaaataaaataacacacaaacccactctcatccctgagaccctcttcaaaactagcatataaaaatagctatttgaagaggttcagtgaaattcaaggtaacacagagaaggaattcagaatcctatcagataaatttaatagactgaaataatttttaaaaatcaggcagaaattctgtagctgaaaaattcaattgacaaaccgaagaatgcactaaatctttcaacagcagaattgatcaagcagaagaaagaatttgtgagcttgaagagataatatatgaaaactcagagtcagagagacaaaagaaaaaagaattaaaagaataatgcatgcctacaaggtttgattattaagctactcaaagagatacaagagaagggtgaaaaccaacataaagaaatgtaaaaaacaatcagaatataaatgaaaaattttctaaaatgctagctagtttttttttgagacaggctcttactctcatcacccatgctggagtgaagtggcacagtcatggctcactgcaggctcaacttcctgggctcagatgattctcccacattagccttccaagtagctaggactaaaggcgtgtgccaccaggccaggctaattttttgtatttttagtagagatggggttttgccatcttacccagggctggtcttgaactcctgggctcaagtgatccaggagattcactgccaaaaaggatataaccaagtcatatagtcataggttatctaaagtcaatgtgaaggcaagaattctaagagcagtgagacaaaagcatcaattaacttataaaggaaaacctatcagtctaacaccagatttctcatcagaaaccttacaaaccagaaggtattggggtcctaatcttttggcttcttaaacagaatagctctcagccaagaatcttgtgtagagtgaaattatatttcaaaatgaaagagagaaatacagtctttttcaggcaagcaaatgcttcaggatttgtcacggctagaccatcctacatggaatgttaaagggacttctaaatcacaaaacaaaagatttaaatagaacagaatagaacctcttgaaaccaaaaaattcaaatggcctataaaacaataacacaataagaaaacaaagtagataacgatcaacatgatgactggaacaaatattaacattgaatgtaaatgacctaacactccacttaaaagacacagattggcaagataaataaaaaatcacaaaccaaatatcagctgtcttcaagagactcacttaacatgtaaggattcttatagactcaaggtaaagagatgataaaagatattccatgcaaatggaaaccataagtgagaaggaatagctatccttatatcatataaaacagactttaagcaacaacagtaagaaaaagacaaataaggcaactatataatgataaaaggatcaatcaaacaagaagatattacaatcctaaatatatatgcacctaactttggagctcccacattcataaaacggttatgatgagacctaagaaaaaagatcaacacaaaacagtgagggtgtcctgggttttctttttattggacagcagtgtactagcctatcactttcccagtcaggggatttttggtctccccattcccctaccatgggttcatgccaaagtccatattttttattagtgtttggaattggattttttttttttgaggtggagtctcgctctgttgcctaggctggagtgtagtggcacgatctcggctcactaacctctgcctcctgggttcaagcaattcttctgcctcagcctcctgagtacctgggactacaggtgcatgccaccacacccagctaatttttgtatttttagtagaaacgagatttcaccatattgtccaggcttgtatagaactcctgacctcatgtgacagggaaacaggcactcagtgaacttcatgcgattgaggagttaatgataatgagagaagggctgtgaggggacagcactggggacaccagagcctgtgacgggctgagttgctgtgccttgggagatgcccttttgactgagccctgggaaggagggggtgtgggggcaggagctgcctgcagagggagtggcctcaggtgggcggccacctggctgcagggaagaggtgacagagttcgtgtgcagagcttggagggtgaggaggaggtgggttgaggtgaccttggtgagggtgaaccatggggggctgtgggccctgctgagggaggccagccagccctggacctacagggtggtttggtcttttttgtcccattcccagcatccactgagtggtgaaactctgcaggccagggaccatcccactggccagaaggagcgcacagtaggtgcccactcagtgcatgttgggctggacagaacctcactctgccccctgcccccagctttgggagctgcagcaaggtccctccccctagggatctccatgcctctgtctctgaggggtgagatggggagacttcaaagggccatctcagagtgtgggggatagagacgcagaagtgtgggggatagagggaggcctgggctctagacccaaaggaccttacacacctcctgagtcttttcaaatggtttcttctgttactttaaaaatgatgtaagtcatcatatttattgtaaatcccaggaatctaatcatgcgtaaaataaggtgtcttatccttgaccccaccccttccccaattaaatttccaggatgttaccactgtttgcagttggtgtgaatctctctttaataatactctgtttatctcacttgtcgttttacgccaaaatacccattgaattatattattgctgaagaccattcttttttttttttttttttttgagatggattcttgctctgttgcccaggctggagtgcaatggtgtgatctcggctcactgcaacctctgcctcctgggttcaagtgattctcctgcctcagcctcctgagtttctgggattacaggtgcacaccaccacacctggctaatttttgtatttttagtaaagacagggtttcaccatgttggtcaggctggtctcgaactcctgacctcatgatccaccctccttggcctcccaaaatgctgggattacaggcatgagccaccacacctgcccagaccattctgttctactgaatcatgtgtggtgggcacctcttatatcaatacatatggattttatcttgtgtttgttattggctcccctttttctcattgcatggctacactcaatgctttgtccacacccctgttcctgggttggaatcttgtgacagaaaatgaagtaacaaaggctaaagctttctaaagtggagtcaggagattgcaagacaattgcactttcaccagcaagagctcaaaccacagaatgttccaatagatttggataaacagctgaagtcagtattcaccagccttcaacatctcaactaggagaaccctaaaattaactaagcacatagaatggaatggacttgtgatttaggattccttctcagccaatgagctgcttctgaaaacaactttttgtggaaattacctgtaaagaaaaccctctcctgtgcttgtcttacagaacactagtcagggctgccctgattcagtggacccgaattgctattatttgtttcctaaacatatggtattttctgtgaccttcatctcaatcttttttttaagttactgggctgtttcccagttttcataatgacgagacattctgcagtgtttcatacacatgtcttttccccatgtggagtattgatccaggagctcattcagtcaacgcatgtttatgaagcatcctgtgccaggctgtgggctggtcactgtcttcagcagagagaggacaggcacagtcttgccttcacagagctcacagctcagggaggctcttagaagtgggatactggtcggagcatgtgcacattaaacatgatgaggtcaaggttgctatagggactaaaccacagtcccaccaagatcgcattgagttcctgtggtagaccagaggtcagggcccctaagatgtcctgagcagctccctctgctcagaagttttggttccacaggtgacacacctgagcacaggtgacccctgcagaacctgtgattaccacccaaagccaagagtgagtggtgggtgttctaggaggaaccgtcacctccatgggcagggttggggaagactgaggggagcaggtggctgatgactttggccagaaggtagggggatgggcaggtgtgcgctcatagggaagggaagagaagggagggcattgcaggcaacaacacaaaggttggaacctgccttcatggactgagaaaagcagggagtccacccaggctgcagctggggagggaagacatggggagcagtgggtctaggggagaagcagactgcgattgaccttggggactgggcagtgagcagaggtgtgttatgtgtgtctgtccccatcatagatatgaggaggggtgaggccgcgggtggcacctgggtcggtgggatttcatagtgcctgctgttccctagagcctctctgtatagagggtcagaatagatctgaggctgtggtctgggggaaggggctggtggtgcttaccatctctaggggtgggaggagagggatgaggatgcccctgagcagtgaagcctcaaggtgtgtggagccacagttgtctctcattagacatgtgttttgcgtgaggatgccagggcctggtggttattactgttgtcaagtttgcatgacaaggacccaggtatccagggatccagagcacagggcccctggtgaggggatgaggctcagatggggctgaccaggttcatgtggtcagagtgggagggactgatggagagacagagcctcaacccctcctgtcaggagctgtggctatgtccaggagagatgacaaggatgacccaggacattgagtgagtcattgagacattgaaggtgaggacagggcagagaggaccctggtgactgctgaaatgtaggatgtgaggagggctctgacccatgcaagttacaggacctccccacccccgagcccacagatgacccttaaattgggcatcctgagtgctgtgtgtgcccagcagggacactggataggctggacctgagtctctgtaagggcagcgctggtctgtaggaccagagtcttctctgtgggtgtgacgtgggcaggaattagcaagatgggggtgacaaggcttggcttggaggatctggtacagaagcccatgggcttggtcagctcagcttctcaggggctcagctggggctggaggagcaggatgctgtgctcagggcatgctccaggcagcgtgatgtgtgtggttccagggtcaggcacgggggtcaaaaattaaccatgaaaagttcccaccttctgtaggcagagaaaatggcctgattgtcagggtcagggagacttaccatgtggccaaagcaggctctcagcctcccagagaccacaccctgggtgcagcactcagctctgcagggtatggcaatagatgtgccaagaaccccaacatccagatgcatgcaaaaattttgcgatatataaaatagagcagatcaagtttccctgcaataacgttgttcctggttgtgtctttttcttgtaaactagacatggacatctttccagcagtctgttctcatctgccaccttcctgctgcagcacctcagaatgaacattcctgagacactgtccgtggtgctgacgaccaagagctatggaacagagtgtgatgtagaatcttctagttacctctgctctcctttcacttttaacaacagagcatcattaacaatgagaaggtggagaggtgttcaggatcttgaagtgacttctgtcttgctctcccataaccctgaagctgctgtagacattattgcagaaactgacaccacagtcaggatggccttgtccaggagcccatgtgcagtttgtagtgagcaaggatgagaaaatggtcttgaaaggggtgatggacagaacaggggcttttcaaaaatgtcacatcatcacccccagcatccgtgaatctgtcacatggtaagagaccttacagattaaatgaaggattatgagtttggaagattattgtagtttatccagatgggtccaacataatcacagaatcccttccttacaaatgagagagggaggtgggagagtcagagaaggaggaggagatgtggggatagatgcagaagacagagcggtgtcaagatgctgcactgctggctttgaagatggagaaagaggacacagccaaggatgcaggaggcctctaggaggtggaaaaggagaggaaacgcactctgccctggagcctccagaaagaacgcagccatgtgggcaccttggttcaagtttctgtgtcacttagcttgtgggaatttgtcacagcctcaacaggaacctacagaggagtcaccttgtgtgcaggtgggatccagggtcatttacagctaaatcctgatgtaaatattgcaggttgcttttcctacttcctatctcatggccaacaaccctggacaatggcagaacacccttggaaaccacggctctgtgctttagtggagggaccagcttgtttgtgggaaggtagcacctggtccaagtgaacctacatgagatcgttactctccccagggccctcagggaagggctgagaacagctggcccaggtgtgtggaggagctgcaggtgaggcagggctggaggggcctgtgggtccaggtagaggggcagacaggttgtcccatcgccatgggagcctgcacgagctttaggttggggaaccctgctcctctgacctggacgctcctgtgtggagaggaggcttgctcagtgagatccacgccagggggtaaattgggaactgatgggaaatgaggggctagagtcctgggtagtgcctgggaggaccttgctcaaggactgaattcttggtctgttcccaccttggttactctgacaacccctctctgtgtcccacggggataaagatctcctgagcagtggccattgggacagaggagaacctggtggccagagctaagcatccaggatcctggatttggggacaggcaagctcattgctgggggacagtgatagatacggcctccagggcctgggtgaagagagcaggagggctcaggacactggaggctgtgtggaggtcacacccacgatctgtaccacccatggatgctcctgcattgctcacctttgtgtggacatcagatggccccaacttttgcactcctgagacatctcatgcattcacagagggacccaggctggggctgtgcatggccttggtctctagggtagtgtgaggacagctgagcactcagctggctgggcaggactcctgcgaatcctgccctttcctgtgtagggtccaccccagcctgactcctaaccccctactcctgtctttccagggaagagagactggggttgagataaggtggagatatttttcctgtgtgacccaggagagaatggacatggagtttcaggtgagtttctgctaagttcccatgagcagaaaaagagccaatgagaggaagtttcccctttattcagatcctttccaggtgaccccgggtgggccataggcccattcactttccctgcaagcccccgcttcctgtggtgatgggaagccttcgccttggcccacccagagcccggggcagtctgttgaggtctctatatattcagcagggacccccatcccttcctgtccccaggcctgtgtctcctcaggactcagagctggttctctggctcaggctccatgtccttccccatccccagggctgggggcttcagggacgctccatcaacccacaggagcagctcccagaggaacctaagaagccacatctgctttgtggtcgatccagcagtaaatgtttgtgtcagagtgtagcaattccagtaaaaacagagaagaggtcttgacccctgaggccttctcagaacagggtctggcatctctctctgggcccacccagggctactctgggactgaacctggctgtgctcagggggttcctgctcccaggcccctccctcctctgctcaccacctcctgttattttcactgcagtttcctgaacttcagctcagccagatgccagtggggacagatcctgggtctccctggggcccaagggaccagaatatctgtggcccccactcacctcatagatgagagcagctgccctggtgctgggtaggggaatctgggcaggggagagaggggtgtcaggggacagggaaggattcctgctgtgtaggaattccagggctctcctcaggtgatggagggtcccagggtggggttagcacagggagtggatgatcctggccctgaacagaggcccagctcatggccagggcaggtctaaccttatccaagtcattctgggtagggtgggtttgtgctggggattgacagtccccctgccctgagcctgcacagctggggccccagtggaaatgggattgggaacggacagtcttacctaggagatggagctgtcagagggtccatggcctggggacagagacaaaagtgagcacgagagtgttaggatagctgggcccctcctgcaagagtgtgtgggggtcctcagttcttagagaattggggagagggagcctttctcaggttattttaggggtcaagtaagcaagtgaggttgaggaagtgacccatgacccagagcccggaggttagggctgacccggccagttggggtttcctgtgtgatgttttatgggatcctctttgcagccccagggatagggtcagaggcccctgggtgtaactggcaggagtggacaacttggggctggcttagtagttcccagccacacccagactgaagggacactcaccgggggtggaggctgggggctgctgctccctgaagtcactctgatcgctggccctaggaaaggtcagggttatttgtgaaggtgcaaggttaaaagtcacaaattggagttaaaataggggaccaggaaaggagcctatttccaagaggggtatggagacctcctttctttatggagttctgtggtaggaggggcccaggtgaggggagttgaggaaaggccttacaaagccacatctgtcctggccagaggggaaggactctcaggcagatgctgggccaggagaacattgatccagtgacacaggaaagggactgaggacccagggaaggaatcagaccaccaggggttgcctgagaggaagggtcaaggcaccagggggaaagcagggccaggcacatgtgcaggacactgaggggactgcatgcatcttggattctcctggaactcagtgtccctgctgtgaccagacactccactcagggctggagatgctgaaatgggacaatgatcttgtcttctgtctctgccctttggcaagagacataaacgacattccaggatatgccatattggggccccggttctcccttctcacagctcagtgtctgcagttaccatgtcagtcaaaggggtgctgaccccacccagcccgtccaggctgttccagtctccactatgtgataatgcccaggatcccccctcagatgccctctcactgggtggatggattcagtgaacagggggaggtaccaggtattgagcaccgctcccccctgctccaggcagctgtggctttgctgtgctaggaaactaggaccatgctcaggggcatggccttaattggactgaattcactgaggacaaagctgttgaggaagcagcccagggtcagcagctggtgaggaaggtgccatggaatgagagggaaggatccctggggagtcgggaggctggggagagcctggcactgaatacaagacagggtctccttccttctcgcctggggtcagcgtgaaggatgggagcagaatggggaaaagctgtggtacctgccagtttttcggaggagcaggaaacacacaagtgcagccaccagaagactcccaaccaggaccccgatcaggatgcctagagtgttgtcatctgctgaaagaagaaggcaaaggggatgaggtccaaatctgttccagggggaaccatgaggggccttgcagggcaggggcatggtcagggaggaaggaaatgccatggagcctgagtgtggtctgttgtgctgtcctcatagctggctcccttgctctccgtggttgcaccattttctgtgtcttaggcttgaattactgggatgcatcaactcctacattctcccacaggaagcctgcacctcatcctgctcctgtgttttttagtccctccttcctctcacatcactcctcttccccctgtttctttttttccatcccatggcagtcgtaaagggcaggcccttgctgccaactcaatgctgatgagcagggatgatgttcattgactgttttcaggggccttccacatggaaggcacagtgggaatcaatctacctgcagcttttctcaccctcccattgccttgagggagaagggtatgtgatattgtgaaatacgtatttggtgttcatcaccattgatatggttaggctctgtatccccacccaaatctcaccttgaattgtaataatccccatgtgttatgggagggaccttgtgggaggtaattgaatcatgagggtgggttttttccatcctgttcttgtgatagtgaataagtctcaggagatcagatggtttcataaagggaagcttccctacacatgtcctcttgcctgctgccatgtaagacatgcctttcaccttccatcatgattgtgagacctctccagccatgtggaattgtgaatcaattaaacctctttcttcatacattaccaagtctcaggtatgtcttcattagcagtgtgagaatggactaatacagtaaattggtaccagctagtggagtgctgctataaagatacctgaaaatgtggaagtgactttggaactgggtaacaggcagaggttggaacagtttggagggctcagaagaagacacaggaaaaaagtttgaaacttcctagagacttgttgaatggttttgattaaaacgctgatagtgatatggacaataaagtccaagctgaggtggtctcagacagagatgaggaacttcttgggaactggaacaaaggtgactcttgttatactctagaaaagagattggtggtattttgcccctgccctagagatctgcagaactttgaacttgagggaaatgatttagggcaactggtggaaaaaaaattctaagcagcaaagtgttcaagatgtgacttgggtactgttaaaaacactcagttttatgtatttacaaaggtatggtttggaattggaacttatgtttaaaagggaagcagagcataaaagtttggaaaatttgcagcctgatgatgcaatagaaaagaaaaatccattttctgaggagaaattcaagccagctgcagaaatgtgcataaacaatgaagagcaaaatgttaatccccaagacaatggcaaaaatgtctccagggcatgtcagagaccttcctggaagccccttccatcacaggactggaggcctaggaggaaaaaatgtttcctgggccaggcccagggctcccctgctgtgtgcggcctagagacttggtgccctgcatcccagccactccagccatggctaaagagggccaaggtacagctggggccatggcttcagagggtgcaagccccaaaccttggcagcttccatgtggtgttgagcctgcaggtgcacagaagtcaaggattgaggtttgggaaccttcgcctagatttcagaggatgtatgaaaatgcttggatgtccaggtgaaagtttgctgcagaagcagagccctcatggagaacctctgctagggaagtgttgaagggaaatgtggggttggaaccccgacacagagtccctactggggcactgcctaatggagctgtgagaagaagaccacaatcctccagaccccagaatggtagatccactaacagcttgcaccatgcacctagaaaagctgcagacactcaacgccagcctatgaaagcagccaggagtggggctgtaccctgcaaagccacaggggtggagcccaaggctatgggagttcagctcttgcatcagtgtgacctggatgtgagacatggatacaaaggagatcatttcagagcattaagatttggctgccctgctggattttgggcttgcatggggcctgtagcccctttgttttggccagtttctcccatttggaatgggtgtatttacccagtgcctgtacacccattatatctaggaagtaactaagcttgcttttgattttacaggcttataggtggaagggacttgccttgtctcagatgaaactttggacttggacttttgggttaatgctggaatgagttaagactttggggaactgttggaaggcatgattagttttgaaatgtgaggacatgagatttgggaggggtcgggtggaatgacatggtttggctcttcttcacccaaatatcaccttgaattttaataatccccacgtgttgggggaaggacccagtgggaggtaactgaatcatgggggtggattcttcccatgctgttctcatgatagtgaataagtctcacaagatctgatggttttagaaaggggagttcctctacacatgccctcttgcctgccgccatgtaagacatgccttttgccttctgccatgatttcaaggcctccccagctatgtggaactgtaagtcaattaaacctcatttttaaaaaaattacccagtctcaggtatgtctttatcagcagccaagaccagctcggtcgcggagatcctaacccagcagtgctagaggaattaaagacacacatagaaatatagaggtgtgaagtgggaaatcagggttctcacaggcttcagagctgagagccccaaacagagatttacccacatatttaataacagcaaaccagtcattagcattgtttctatagatattaaattaactaaaagtatcccttatgggaaaccaagggatgggccgaattaaaggaataggttgggctagttaactgcaacaggaacacgcccttaagatgcagattgctcatgctattgtttgtggcttaagaacgcctttaagcggttttccaccctgggtgggacaggtattccttgccctcattcctgtaaacccataaccttccagcttgggcattagggccattatgaacatgttacagtgctgcagagattttgtttatgaccagttttggggccagtttatggccagattttggggggcttgctcccaacagactaatacacccattttctggtatgtgactctaaagtccttagaatcttcaaagtgatgtctttttcaagctaataattgactgatgactggcagcccctaggcaacttcagaatgaggctggtcactgacccaggtaggattagagggttgggactttcagcctcacccctaatccctggggagggacctggagtttgaattaatcaccaatgaccaatgaatcaattaatggccaatgattgaatcaattaatggccaatgattaaatcaatcatatctatgtcatgaaccccaaaaggactgggtttgaagagctgaacccatggaagtttctggagtgtggtgcatctggggagggcatggaagctccacaccccttcccacatgccatgctctgtgcatctcttcatctgcatcctttgtaaagtcctttattacaaaccggtaagcctaagtatgtgtttccctgagtcctgagagctgtttgagcaaactaatccaacccaaacagggagtcatggaaacctcaatgtgaagccagtcataagaagctctggaggcccagacttgtgactggtgggaaggtggtggcaattttgtgggactgagccctctgctgatatgtccaggtagatagtgtcaggatggaattggaggacacctagctgatgtacggtgcagaactgattggctgctgggtgtgtgggagaaacccccccgcatcacatttggtcacagaagtgtgtctgtgttgatgattgttattgtggagtgagagcagaggaaaaacacagtttgagtttttccaaacagggtggaatcccatctgccaatttagaatctgaaacttatagtttcagtacttcaattaagattgaagtacttcaattcagtacttcaattaagattcagtacttcaattaagattcagtacttcaattaagattacagaactggtaagtgaaagtgatacaacaaaaatgtaaccaaagtctgctcaacttaacagctaataacaacaaagttcataaaaataataccagtcgatattgatagcactgattgagccctggctctgtgcatgaccttgttaagggctttaatcgcattaatctctgaataaatatcctcacaaccaccctgagatccaggtgtttgtaacaattctacagatgaggaaactgaggcccaggaggttgagtgtcttgcccaaggtcaaatacctggtacctattgtaaccaggatgataactggatgagtctaatccctgagttcttacccacattgctccccaggctctgaaggaatctcatccttctcattccgtgtatcattttacaccccccctccctcctaggaaaatatacaaggaaaggagtgagaggggccgagggtcactcacattttacagtcagcttgagggggtcgctcctgttggagctgactgggttggagacctcacactgatactccccagcgtcctcctgcctgatggggtctatggtgagcatatggttaaaccaggacagcttcatcctcttcgtgacctgcagacgctggttgttgaaaatccactggaaagaggttccagtgttatttgtgtggcaggtcaggaccacggagcccttctctgtgactgtggtgctgctggcttggatggagggctgagccactgactctgtggatagagtgaccaacagaaagtgtcttggggccatgctgcatcctcagagatctcagagtcaaatttagaacattctcctgtgaataaaggagaaagatgaaggacagggaggagcagagagaaccagagacacccatagcagcgagcagtagggactacagtgacctcagagaccccagggaccaggaggacccagctgcctcagaccaggaccagggagccctgaaaaccctcccacagatgagcggccccagagtcacatgagatgcaatacctggggtggctttaggagcaggcagtcagagaaatggaacatgggtctcagcccctaagggacaaggaagaggtgtggccagctcctcctaggatcctacatccaggacccagtctgtaaagaggttatgattattcctttcttttttcattaattccctccctccttcatcagagaactactgagtgtgtgtctcagttgggccttgtgcaggtacagggtgtagtgggaagagaaagctgagtcctttccttcatcctcccatgggagtgacatcaacaaatcaagaaattcatgatttcacgtccagtgagggaagaaatgtggatctgatgggagaggcttggacaatcctggcattgagtctgatagttgagacaggtgatttcgttctaagtaaaaactgactaattctccatttgcccgtcattcctcagaccagaatctccctctctgagctgaggatgcccaagaagaaaggagctgaaccaacatctggtcctggggtccacagatgccccacggtggtggccacgaccagattctgggctgcagacacacggtggtgtgacgttgagcactgacagcctgtgtgatgctgatgcaatttctctttaataaaatggggtaaatgtcaatggtccctggcttgccatcctctctgtaaattaacattaaaatatttacaattacctgacctaaagcttggcacagaatagctccaaataaacatcatctattattattttactccaaaaaaaaaaaaaaaagagttctctgggcctgattcctggtggagaaggagcggtccagagtgtcttttctctgctttccctcctcctgaggacagtgcacttcccgggacatcttttaagtttcccatccagtttaatggcctgggaagtttgtttgtctgtcctctccactctgactctcaggtgaaagatgaggctctgcccttgcccagatggggctctgggggctgagccctgcctggtgaccagctctaggaaccacggccctgggacagctggtaaatcgttgctcacaatcagccctgcccaggaagccacaacccagccctggcacaggctccccagggtcatctggagtcaggatcttgggacaggggcctggggcaggggcttgaagggctgagcttctctcagaggatcctcaggccaggccctgactgagtcctataagatctttctcaggtcatgtctatgaggaggaggccaagcggggttggactgagactgattttcccccgctgcatctcccgcatcagactatccttcttgctgtagggaatttccacggagtccggataagggaaaggaattctgatctgttatagtttgtctcccctgggtgtgtcctgcactaaatgcccaaaccccaacatgggacgtaatgcagagggggatgcaggcacagcccaggcctgacaatcctgcgtatgtgaagcagaactgacccccaacacccagaggcacggaggaatcactcaccgtatacacggagatggtgagatgcctgttcaatctgagaatttctgtatgtgacttgtagggtgtagtatcccgtgtcctctagggtgacgttctggaaatgcagatctccactgggtgatattgtctctcgaccgctgtatgcaggccctggagtcctaacgtgagtgtctattacatatgctgcgattagctggttgggctccaccgttttccctttgtaccagccatagctgtaaagattctcgggcagataaaccacagagagatgaacattctccccttcagcaacttcaaagggcgctgatgcaataaagagccaggcagtggtgggtgcgttccagaaagttaaaagtgaggctaggaaagggagagaatatcagtcaatatttgacctatgcattggcatggaaagacggggtcctgggtgcaggtctcttcacccctcagccttagagggtgtgtgtgtgtgtgtgtgtcctactgggtcaaagtcagcagcatgaccctcattccttcagtacctctgaccttggcatttccttgtgtgaaccctctttcccaggggtctgcatggttccctccccactgccttcagttcctactcacacaagggaatccctgggagacttctttcgtgaagcctcctctagagaccctgggtcttccctttctgacctttcccagctctgttccctccagggctcttgtcagcacctgacctcacattctagatctctttgggtgtctgtcttcccccccatgagattgtgagctctgtgagggcatggacttgagtgatgttagttgcaccccagtgcctgggacaggctgcagactcctgtggatgagttcatgagcgttcccagggccttccatatcctggggtttatttgctaatgtctgaggttggcagatgaagacagagtttcatgccctggtggtgtttttatttaaattgtcactgtgatatagttttactatcattttcaaaatgtagtggccactgacaatgaacttgaaaacatggaccaactgagattgttttgccccttggcaattccagttcacttagattttttggttctccttagacgctctctcccctgagtctctaacaaaagccctctgtctcctctcagagccccatcctccccaggagaccccagccagtctctgtgctccctcctcccacccactcccagggagtcctcccctcacctgtgagcaagagcccctgccaggggatgcattctctgtggggacaagctgaggggggccccatggtctctgctgcctgctctgtcctcctctgtggagaggagcttgggctccaggaacgctctagacagggttactgtgactgttgtctctgctgtccttccttcctctatgctgagcttcctctcaggcaggagcacttcccgtttatgggcaagggcggggctctgcctacaatgtctctctgtcccctcccctctcagtcctgcctcccttgtccctcctttctccttcctttttgcctatatttggttccctaggcaaaactttgagaagcaacgctgatggggtcctcataacaggacgacccactctccccagtactgacctctgctgtgttctggccttggttctgtcacagccggtagattatttccctttgtgacacacaaaaccagctgggccctgggtctcctcatgctctccagtgctccaggaaggcagaatgatgcccagcaggaaagtgacagaggtggctctgggggctagaaaggggctcactgggtgatggctgggaaggacccacccgctatcttcagtgtcaccagcctggcctctgacccagggacagagacccaggcctggaggtctcgggaggatccccagctcctaggtgtggagggaggtgtcctgtgtgtcctgggaagagaggactttgatggaaggaggtgggaggctctgggttctgctgtccttggtgaaggtttcagggggaccctctccatgtctggggtctgtgcccccagcttaactctcattctctttgcaaatacatatattttgtggatctgcagttgcctgaactgtctcatgtccctaaatctttgtatccctttttacagaaggtcaggaagggtgtgtacatgagtatgaggactatctgatcagggcgagtgtttgtttcccaaagatctctttagatatggtataatacataagataaatgtactgaattagcaattttaagtgtagaattaaatgatactaattctattcacaatgttgtacaaccatcaccataattttttaccagaaaatcttcattataccaaatggaaacttcatacttttaatcaataactccccacttccccctgccccacccactggtagcctctgatactatcaatctctgtgaatttgcctagtttacatgtctcatataataaggaattatatacgtgtattatttttttctggattatttctcttagggtaacacttttaagattcatccacgtcgtagcatatattacagcttctttcctatttatggctgagtaatatcccaatatatgtttatacctcaattttaattcattcatctcttaatggacatgtgggtggtttccacatttttgctattgtgaaaaccgctgcaatgaacttacacttggaagtatctgtttgggtttctgtgttcatttctttgggggtacatataggagtataaatatggggtcatgtggtagttctatgtttaagtttttgagaaacagccaaactgttttccagtttgctgtgctattttatattcccatcagcaatatacgagggttccattttctctacattcttgtaaacacttactatttaatattttttaaaacttatagccattctagtaggtgtgaagtgatagctcattgcagttttgattttcatttccctggtggctgatgaagttgagcattttttcatgtatttactgacaattttaatattttttagagaactatttattcaaatcatttgctgtttaaaaaaaatgggttatctttttattattcagttgtaatagttctttatatattttagatacaagtcccttatggggtacatgatttgcaaaatttttctcatattctgtgtcttctcactttcttcatggtgttctttgaagcacaaacatttttaactttgatgaagttcacttatctatttttaattttgttacttatgctcttgatgtcatattgaagaaaccattgcccaatccaagatcattaagttttactcctatatgttcttctaatggtttgataagttttgctattccatttaggtttttgaaacattttgagttaacttttgtatgggctgtgaggtaggggtctaactacactatctcgcatgtggttatccagttgttccagcacaatatgaagaggctaccattctttccccattgaggaatcttggcacccatgtcaaaaaccaatgggctgtaatggtgagggtttatttctggactcttgattctattccattgatctctatgtgcattcttgtgccagaagcacactgttttaatgattgtagtgttttagtaagttttcaaattaggaagtgagtcctccaatttttttttccagattgttttggccattctggggtgacttttaaaaaagatgtagttcaatggttctcaaagcaggagtggttcagctctccttttttggcagtctggagacctttttaggaccttaatctaagtagataaattattcccactttcttttctgagttgctatgttacagtgtatattgacacccatgaaataattgagagaccctggaagtgcttgcctacatagtgagggacaattagttccatgatcatgggcacagaagattttgttttgggaaacaattttgttggtggagttatattcatgcttactcttttatttgtcttcatagcctgcatctccttcagacttcatatctgtttattttcttgtttgtcctctggggtttgggtgttgggtgaccagtcagctggagctggaggaggtgcttagcaaggcagtgaccctggttgggaggagcagggctcagcagggtgaaagtagctgggccttgagtcaggagtggcatctggaaggcctgactgtaagggtcagaagggccagcaggtgggtgtcctaggcacaaacggtggctgctgctgtggactggaggaaggtaagaggccccgagtattccatgttcttactggctccccaactgaggattcctctcctgggctggtgctgtcctgcagcagggaggggttagacagggacggctgcacatcaggccggagtccatgtcatcctcttaggcactgtcactacagattgaggattctgttcataagccaagcctttgcacaaggaagggacccgggctctcaaggaagagcagctcctggtcagacctccatctccttctctctcattgcctgaggcctcaagcttggtctacctggcacaggggtctggatcctcctcccagggttggggtcttactgagctgggcacctgcaggtgggagaagatctggaggggccccatctgccttcaccagattgatgttgagggtccctgagtcctgcaccactatcaggtgctgagcaacttccagtgtcagtgacaaccaccccatggtggaagcagaaccacctcgtgagaaagcacctccaagcctcagtgcttgccatgtgtgggaatttgctggtttcagttgggggcatgttggtgggtggtcatgaattcagggccggattctatgctcacagtgcacatgctggatgtggtacagaccccaggcagggctcagtggggtggttttgggtgtgcacaggtatcttttctggaggagctggtggtgatttggctcccagaagttcctgagctctgcagactcaccaagcactcaatatttgagtgaacattgggcgagagagcagaaggtaagtgtcagggcatcggggttggtgcctctgggaagaggaggaacattctgggaacaaagctctcccccggcttacagggagcttcccatcgctcctgccttgaggatcagggaaactagggcctctgctcttccaggggctgcttgcaggcagtttgctctgggagggggtgacccaggagttgcctctcattttgcatttgagatttaaaaggagaagggacagtatatcttgccaggtcacaaaaattacaggcatcatattgactgaagggcactcctgtcatcactgcaatataccagaatggtcttttaaaaaaataagtgatttaggtttaccagcaactgtaatgcttgttttattcttctagttcaccgttaatgtcacttttgtagttttagcactggcaatgttgattttatgttgactctgatgattttaagctttcatttgttcacatagagatcatcttctttctgaatattaatgcattttttctctatttctactggttattcctgtacatagagtagagaatcacttttcccaaggaggtggaaagcttctgactaccaaaaaaaaaaaaaagtgtcaaaatgctttaaagtcagtaacttaaagatcaaatccaagagtgggcaacagattctgcccagggtctgaaaggtggagaggtgactggtgaggatgtttaaaagacctctcctctctactccctaaatgggggccatccagtgttcttgaggttcagagaaggcccagggctggggcagcagggcactgtcagctcccagctcccaggggccaggagtaagaccccaacactgtccagacactgattgcattcattttgggggagagtagattcttatttaaagaataatacaaaagtctacaaatatgaacataaacagaaattcctttgctacaattttccccttaataagacattccttcctaatgacatatgtgactgcattcatggctgagatgttttctaggatggtgagagcatcagagtggactatctggtgccttggggtcatgcattttcttcttccaatgtctacaggatcccccatgtcccactttgtagtgtaactcagtgtgtgtcattctggtttttgttgtatagatccttggaaagcccatgtcattcctgctgtgaggtacaggcagccaaatggcatcatctctaaacatgccttctcctggtacatcaaattatggaataaatgaaagccattttgacagatattgaagatataagtttctactcttcccacacatgcttctcccaagtgaaggattttactggtgaattgttattagagattagtgtggatcagtgactctgccaggggaaattttgccctctaggggacatttggcaaagtctggaaacattgttggttgtcagagctgggggagggagtcctgctggcattgagtgggtggatggtgctgaacaccctgcagttcacagagccccaccagtttgaccacccaaatgtcaatgctgaggagtggagagccctgctgtgccctcccgcagcttccctgaagcttcccctcacctgctcctcccatgtctccccaccacttccccacttcacccgcctccttacacctcagtcccctccacctgaactcaccccttagtccaaggccagccctgatctccgctctcctggtctccttgctccttagcaggaggcgcccactagatggcgcccttgcccttactggagctcaccgtctccctttccaccctgagacaaatgtggctgcttttactgccacaaccccagccctccacactctagatttgctcagggagcagctcctggacagacctcagggaccccagggaggagcctcactctggagattttgatggcatggtctttgaacttcactgttacccccagtcaggatccaggatgttgggagtgcatgattctgcccggtcccacttcagcaggaccccactgctgagttgtctgtggggacccgggcctctcatctccttcttgcattgcaggagagggatcttagcactgctttcacataaagtcagataatggaggagtgcaggtgagtttgggaaggtggacatgaagagaggttgtgtccctagaggtggcagcagtgagaggatgggcaggtgggaggaacacagcccatccagggttgccagccatattaggagcgacagcctttcctctaagcctccagcctttttcctgaaacattccagaactttccacttcagcacttcccactgaggctcctcaggtctgtccctgagctcccagctgagcctacctacccatctgaaatcctgagtcctgtgtcaccctcgttccccattattctgtgcagttctgtgggacgcccagctctcctgacacccccagtcttcagaatggccatcagcgctgtcgctgtggcaccagggtgactgccgcctggaggctgagtcctggcttcctgacagctgtggggcccgctctaggctcccttgtcctgatcattcatcacctccaggatgcacagcagctgggccagggggaggagcagggacaggtgtcagccaccctgtgtgtctgcaagtcaggctgggggtgtgggaggacgccaggaatgactgaactttctgatttagagggtgagagcttgcactgatggaatttgggatttaataggaaaagcatagcgttttcctattttgtaggcagggtggctggagtttggaatcatagattcccctgggatgtcactgtggacctcagtcccacccgttaggggcacagatttcagaatccacaccctggggcaaagcaggcatgggaggctccatcagcctggccagggctctctatttgtgcagctgctgcaaggagatgtgcactctgatgggaacagtgctccctcctccttggggggcagtatctagctccctgcagcccctctccctgcaggccctgccctctctgaacctcaccttccccaacccgccccccgcaatcccatctcagctgtaatcccaacactttctcatccattatgggtggactgcttgagcccaggggttcaagactatgctggctggacaatatagcgagttgttgtctctacaaaaagacaaaaattagctgtgcatggtggcatacacctgtagtcccagtcactcaggaggctgaggtgggaggattgcttgagctggggaggctgagttggcagtgagttgagattgtgccactgtatacttcagtgtaggtaacagagcgagaccctgtctcaaaaaataaaagtaaaaaaaaaaaaagaaatatggaatacattattgttaactctaatcaaccatgctatgcaatagtccaccagtaataccagtaatagccaataatgaattatctgaaaaagaatacaatttattcttagctatctactgctaaaatttttaagctatcttttatgatagctgaaacaaaagaagtaaatttaaccaaggaagtaaaagacctttataatgaaaactgtaaaacattgatgaaataaattgaaaaagacacacgcacaaatagaagatattccatgttcatgaattggaagaactgatattgctaaaatgtccttaccacccaaagtggtctacagattcaatgcaatttctgtcaaaacaccaatgatattcttcgaagaagtagaagatcctaaaattagaaaccacaaaaattcctaaaacctgcacaaaacaccctgagttgccaaagcaatcttaaacaaatagaacaaagctagtggcattacacttcctgacaatcaaagcatactgcaaagctatagtaaccaaatcagcatggtcctggcataaaaacaagcacatagatcaatgaaacagaataaaaatcccagaaataaacccatgcatctctagctaactgattttcagccaaggagccacatgcacacaatggggaaaggacagcctcttcaataagtggtgctggggaattggatattcatatgcagaagaatgaacctagaccctatccctcaccatgcacaaaaaattaactcaaaatgtattaaataaagacttaaatgtaagaactgaaactatgaaactactagaagaaaatatagggggaaaatccatgacattggtctaggcaaagagtttttggataaaatctcaacagcataagcaacaaaaccaaatataaacaaacgggatttcatcaaactaaaaagcttttatacagcaaagaaaaaaaaggccagcagagcaaagagacaacctacaaatgggaggagaatatatttgtaaatatatacatatatatttgtaaatatatacatctgataagaagataatatccaaaatatataagaaaattatgtttctgtatagttttatctgactgggatacagaggccacatccacagtcccatcctcaaaggccacttgttcccaaaatgtcaagcacatccctcaatgatccatcatcaacacctatgtctgtaggatgaagggtgaatcatgaagcactaaaaaggaagaaggaagccaatcccaaaacaaaatgatgcagggtctggaaagtccaaagcattttttttttttttttactgcatcttcctcctttcttctccacattcccaatcctcactattgattaacaaaacaaaaaaaactgggacccaccatcttccctactgtcaggagatctagcgagattgtttgagtcttagaccaaactttgccataagccaaatttctggctgactttacaatgatatgagctagcacagtctctttttctgccagtcaacttgtgctcggttttatttgcaaccaaatagaggtggtaaccaaatataggtgaccctaaaattagtcatcaggatgaaatcctaaaatgtgcaacaaactgggttgaattcaggattagtagcaacatctctgttgtgggcttgaaaagggggcacccttttatgcagtagcaaaattgctaaattgttgtttgctgagtctttggactctcatcccggattttctatgaccattcaaacagggctgcaatgaacatctatggttgtttagcttggcacacttctacatttctatatagtaatatctagaagtgcatttgctcaatcacaagatatgcacattttataattgactgctatcgaactaccttaaatagccttaatttgttctcaacattgtttaacagggtctgtttaatgtcctacgtccagcaaggacagtatcacttttcttaatatttttcaaattattggaccttaacaaatacttaatgtgcaattaattgattcctttgtattcccatgccttcttttatatgtttccttatagtacacaaaaccacattattgtttctttacttgtgtcattccaccctggaccattcctatctaaactataacattatgagagagagagagagagaaaacaatatgaaaatataaattgattaatcaaaaaaatttaaataggacaaatcaggaagacacaagagagattttaaaattattcagagaataccacaatagctgtaccaatatattttaaaacttagatgaaacggacaactatctcgataaatgtaaattaccaaaactgactcatgaaaaaatggatattatgaatagagcaataatcagtaaagcaattaaaaagacagttgataatttttatttactgacaacaataacaaaatttcaggtcctgatatttttatggtgaattttaacaaattttcaagctcctcctcaaccaattctcagaaggtttaaaactttaacaagaaaacactttctaacacattttcagaagctgttatagcatgataccaaaaccacacaagaaaattatagaccaatctcacttacaaatatacatgcaaaatcaaacaaaatcttagtgaaccaaattcagaattaataatagcaaacaagcaaaatatgttatcatacgtatggcttatatcaggaatgcaagtatgtttcaacatcagaaaatacttctccacattaacagactaaaggagaaaaacgcttgtttaattatctcaataggtttttagagaattttgaaaattttataaagttatgcgtattctgtaaaattgatgaaatccaaccttgatttatttttaaaaattgcctttcctatagaattataggtaaaggaaacacatgcatcctcacagagctacttcaaggctaagttacttcccataagtaacgtatcctgtaatgtgtgcttggcacatattcaatactaaacaaatatttgcaaatcctcaaaccacttctcgctcaaataacccacctttgtcttttgcctttatgttagggttgattttctcaattgtatcttggagatcctttggtgggtctttcagcaattaccctgaatttgcttttctgtttacaattttaattcctgggaactctttcttgttctctgactgcacccttttcatgagagttcagccatcaatcctccagaaccccaccccccccgcccccccaaaaagcaataaagatgtctaaaagcttccttctgggctttcgaatgatgtttaccccaggcatttgttctattcgttcatcacccattttccctacaacttgcctacacttgatatcagatttttatttattagtcacctatcttcttcattggcccattttcctattttgccactggttgttctcaaatgtgttatgattcctggttgtacagtcaagtggttgataatcttggatatacgataaagatttgctctgtagctgtgtgtaagcctatataaaagcttttgtatttttcttcttaaaaaagacaaaagatggttgggaagatccctccagttcaccagttcgaggctgcagtgagctatgatagcgccgctgctctagcctgtctgtctgtgaaaaacaaggggggcggggggcgggggggaagactggagatgtaaatctcccgcagggccctacccgtatccgcaacaggtctctaacaggaacagcctcaggcctgtgttggaacaaggtaggttacagaaatctggaagccagatctgtaacttcagggtaaggactggctctcagggctgatcccccgggctgggtgtcccagaggcacccgcccccgccccttccccaaggcaggccaggacaccttcactcctctccttaggctccccacccccttctcctccccactgtgcctcctggagtagcggtggcggtgccacaggggagcggggcggggcgggctctgagggcaagggggatgggccccgccggggtcactggcggccaccctggaaactcgacgcaggccggcccttctagtgaatcgtcccagccacagctggcctcccagccgcgcttggggcgcctcggggcgcgaatggtgcaggttggggagactcaccacgcaccgtcgggggtcggtccggttattcctcaccgctcggctccagtgggcgcgcgggcctctcctcctcagttcctgcgctgcagtccctccctcacccttcgcagcttgggaatccaactgtgtcattccgacggagcgccgtgaggacctccgagggtgttagcgccaagtgatctctgtccagcgctctgaatatccaagtaaaggagttcaatgaagggcgggtcaacggaggagaaaccgtgactctctcaagggagcccaaggcctccttgtctaattagtgacgcgccaatggatggaggctcttcccaccatctcttcccagcatccagtgacaccaccgccaagggacgggctcggcggaacctgcaggaaagaagcatcggctgagcctgactgcagcgctgtgaagagacaggggaggggatcagtagttggtcccgcgcccaccccctgtttccgcgaggggcggagttgactggccatgcaggcagagggcgaaatgtgaaattccactactcctaccgtttttccctgacccgatggggcggagtgtcgtcaggctaagttccctggcggtaaggtggggagattgaggcgcacacctgccgaacggtaacgcaggattagctaaggcgagctcaggacagaagcctcccgaggagcaggagggcaaaataataaataaataaataaataataaataactcactccttggtctttatttgcggcaggaattcagaaggtgaaagcggggccttaggatctttctgaccttttgggttttaagcaggaggtgtcagaaatgttaccacagggctagctggcttgtggccagcaagcgttcacaatgccctcgatttttcatccctctctgtgggttctttttttcattgtaaggcagaatttctacgattgctcacccactcagagaacctgagctggtttagaccaggtgagacaggctaggtttaccctggtgatgatgtgttgttgccatggcgatcctgcccagtaccagaggccctgcagattcagatgcttggtgcctgtgcttggctgaggggccaatgggtgaagctgccatctgcgggatgatgactgaagcctctaagtcagaatccgcccaggctgagccttagggcagctccatggagcctcggctggcctgggatagagagtccaccactgtgccagcccccagccactgcctaggtcctgtgctgagagccccttgtccagggaaatggcgtccagtggaaaagggaccacccccttgcccttcactcaaggcaggttggtgacaaccctgaagctaatccgttcctagaggagctgcttctgggtccgagttttctctgcagcagagcagctccctggatgggatctgttcaaagtccgcctttcacgcggaattttccgtccttgcaattttccacctccaccactaggggatcctctctgaccgcctcatgccggctctggcctctgagcaggggtttctcttctgcatgtgcgaccttgcgcatgcctagtggccttttgggacctagagctgctccacaccccgatggggttacagagtgcctcgcctccactccaccccaccagggttccttccctggctgggatgggatttcagaagcgccgaggaacagcccagacaggtgtgggagagtagccaaggcccctgtcccggggtggccaggacagcggtggcctcgcataggacctggctgggctgctgcaatcagtgtcctgccccttggagagcaacagtgaaaacaacaagactatcttcacccaccttaagaaagaacagaaccagtatccccaactctgctgtgtatcccaacccaattccattccccaccccactctcagtagccaatatgcaaaatattagaatactcttactgttattattttcaaccacactctgcatcctgaaaaaccatatatttcgttatgtgcttttaaacttcttgaaaatgaaatactgaggctgggcgcagtggctgacacctgtaatcccagcacttcgggaggcggaggcaggcggatcacgaggtcaggagatcgagaccatcctggctaacacagtgaaaccccatctctactaaaaatacaaaaaattagccgggcgtggtggcgggcgcctgtagtcccagctacttgggaggctgaggcaggagaacggcgtgaacccgggaggtggagcttgcactgagccgagatcgcgccactgcactccagcctgggcgacagcgccagactctgtctccaaaaaaaaaaagaaaaaagaaatactgaattttcaaatacttgctttttttttcggtcaaaattatgttctcaaatttcactcctgtagatgtgcgtggctggctgtagtttttgcatttttattattaggtattctcctgttgcattaatatgccacattttatttctctcatgtttttggtgaccacttggggtgttttttggttttgtatttttgctgtatacatgctgccatggtggacatacctctttatacatatttcctgttgtatgcagacacaattttaggatgtgacatcttcagcttttctattgtgtcgtgtgtcttttccttcgtgctttgtgttatttacatattctggacacagattctttgtcaactgtatgtgctgcacatctctttcccagtttgtgtcttcttcttcttttttttttcttaaaaaaaactttctttatagtgttttttttttctttctttctttgttttgttttgtttttttgagatggagtcttgctctgtcacctaggctgaagtgcactggccgatctcggctcactgcaacctccgtctcctgggttcaagtgattctcctgcctcagcttcccaagtagctgggattacaggtgcctgtcaccacacccagctaatttttgtatttttagtacagatggggtttcaccatgtttgtcaggctggtctcgaactcctgacctcaggtgatccaccctctttggcctcccaaagtgttgggattacaggcgtgagccacagcacctggcctgtgttctttcttaagtagatgttacttttaatataatagaatgtatcatattttgcttttatattagtactttttctatctaattcaaacacatccccaagggtctttgtgtgtagactgaccaatttctcaagaatcatgaatgaatactgcttctctttccccaatttatctgtaatgctacctttattataaagtttctatgcatgtgtagaaatagttcctgatttttcactctgtgccaccagcataccaatagcacgctgtcttaaatattaaatagcagagctttatgagacaacttgatgtgcagtaggcaattgcccccttgttactcttcttcagggttctttgttgtaccacatgaattttagaattggcttgtccagctaaaagacaactgcaaggattttatttggaagttcataattctatacataatttggggaaagtattttcataataccaagtcttcctattaatgaacacagactctctctctctctcccccacccccacctgtttagttatttatatctttatggtctgttagttattgtttattgtctttcaaccaggtttcatgtttttctacatagaggccttgcatgtgaaagtctttcttcctagcttgctattacaaattttttttaattgcactttttgggtacagtggcttgtactgtaatccccgatacctgggaggctgaggcagatggattgcttgagtccagaagttcaagaccagcctgggcaacataatgaggtccctgtctcaaaaagtttgttttaaaaattgcatttgctgttattcaacaaatgtcattgtgtctcatatatggatttttatatctgataaccttgttcaacaatcttttgattctaacaatatatcagattcttttgagttttccatatagacaataatgtcatctgtaaattataattgtttcttctttgttatttcttggaccttttattttatatttttgtcttgctgcaaggcaatatccctctatatattgtggggtcttttttctcataaagtggggatggtgaacacccttgtcttgctctctgattgtataaagcatgctttctgtagcattttgtagacgctcttttttagattgaggtaattcacttttatttctggtttactgagtttttagcataaattcaggctgaatttgagctaaagctttttctggagacatcatttgaaaaattcatatgatttactttctttaagtcaccaaagttatgatttacattgaactgagtttctactgtttaactgtattcttgggagaaaacccacttgtcactgaacaatatctgttttatttactgctgtcttgtgtctaaattttcttttaggattttttgtatatgctcagattagcctgttattctcctttctgtatttttttctggtttgggggtcaaagttataatagcctcacaataagagctaagaaaccagccctaatggaggccggggcaggaggtttggagttcaagaccagtctgggcaaaatagtgagacccccatctctatgaaaaatagaaattagccaggcatggcagtgagtacctgtagtcctaggtacttgggagggtgaggcaggaggattgcttgagcctaggaatttgaggctgcagcgaactatgattgtgccactgtactccagcctggatgacagagcgagaccctgtctcaaaagaaaaaaaaagaagaaataaaaaggaaaagataaaagagctaagcatctgtttccttttttccattttctgggagagtatgtgtaagactgtaattaactgtttcttgaataatgggagaactctgtaaaataatctggctttggtgttacctgtattggaaggatgaaaaataccaattcagtttcattattggttgatagggctactcatgctttttgttttgttttgttttgttttgtttttgagaggaagtctctctgtattgccctgttgtccaggctgagatgcaacgttgttcacaggcctgatcctggctcactacagcttctaacttccgatctcaatagatcctcccgcctcagccttcccagtagctaggactacaagcatgcagcatcacatccagcctcttttcctgcctgacccagttctggtttcctttagttttctaggtgttcatccattttatctaatgtttaatgcatttggcataagggtgctcagtgtcctttcattgtctgttgtctgtaactgttgccattttcattcctatttatgagtactggcgtcttctctcactttttcttaataatcctgctggaactttgctttttaaagaacatcttttgacttgttgattcttttttcatacatattaactattttcttattttttgcctttatatttatttcttttcctgtttgaaacattgctcttttcttactataaaaatgggtaagtagctcatgaattaccacctcttttaaaaatcttttctactgtaagcattttagcagtttacatttgcccacaagtaccacttcagctacaccctatgtgcttttacataaagtcttcatttttggtaagacatattctcaaattttaattatcacttgtttttaaatccatgatgttttatttgaaatgttgtttctaaagatacattttctggttatacttttattcttctaatttagcacagtggccacaaaacatggtctgtgcagtgcatacaatcgatgagtaatttctgagctgtagtatttggcataatatatggcaaaatttcctaagttttccatgtgtgctttaaaaaacttccagtaaaatacataaatctgttagatcaagcttctcacattgttcaaatagtctatatgtttactgattcatttgactgcttgatttatcaattacaggtaggaatgtattcaaatctcctattaaagtgtgacactcaagtggctttttaaagacagagatgccaaaccaatgaatacatgattttccccaaagcctgcacaaattctctaatgaaattttaccatgaaagtttgtttaattaaggcttactaaagcagtatgttgtcttttactttttaaacagagaatatatattttaatacatcgtttaagtttatgattaattatctattactgaggataagaatctttgcctgtgctcattcagcatttgcacttcatttatgatctgccttctcatagcttctgttaatttttatactagagacatttatttgtttgtataaatgttgaaggtttttttttgttgttgttgtttttgagtcagagcctcgctctgtcacccaggctggagtgcagtggcatgatctcggctcactgcagcctccatctcctgggttaaagtgattctcctgcctcagcctccagagtagctgggactacaggcatgtgccaccaagcaaggctaatattttgtatttttagtagagatggggtttcgtcctgttagccagggtggtctcgatctcctgacctcatgatctacctgcctcggcctcccaaagtgctaggattacaggtgtgagccaccgtgcccagctgggttttttatattataaggagatgtaatagatagatagatgtttcaaagatagtcaaatgtttttaaaatttaaaacacttttttacaggttgactttcaccatttaatttcatctatgtgttttgccttagagaaattttaaatgctatgtagatctcatgacttataattatgaagcattttgttttctgttttccacgaaacttagcttaactttgagcatataatagttgtaaaggtaggagagtaacactgaaaaaaggaattgcataaaaatggcacattttctgtagagttgtttatcgcctgaaaataggccccatttcatggaagtaagatgatcaggctcaggtccccagacgaaactcttggcatggtttttggagatagtccagggctcagtactggctctatcatttgctacttctcccaaagtaaccaatatctcatccaccctgagcccatttccatatctctaacatgaggataatagcatctaccttacacaccaagtagagggatcaaatgtaggaactaaatcaaagtaccagcactgaataacctacatcctcccacttcccaaaaggaagagagatgtatcccctgttgacaaacgagaccattttgcaggagagaaaggaaatgccagttcacttgcaatgtaaacatgctctctctttttagggatgtccagggacctgagagagaacccatgcttaccaaagagtttctagttccagacacacaggactcgaagggtgacaagtatggttttcagggtccctgaatccacccagtcctcacagaaactcctaaaagctgtcgattgacagcgttgagttcacagctctggtcctcacatgctgatactgcttgtgatatcgaacccgacaggaccccacatcacaattgatttaccaactacaatataatacctcctgaatctccaaattggctcacccaggaacaaaggcttggggtaaaactggattaggagatataagctctgaattttctgagggtgagacacacaaggattctaagtgacacgccacagagtaacgggtctgtgactggaggacccacagatttgtcttactggagacaccacatgcacacaaactccatccttagctgtggaaacaagggtcttttgctatcttagccgaattctgggagtaatttttggaggggaggagatctttgggattgcctctttcaggccctttacaaaaatacctacttcttaaatggtaaagcttacactaaactgaaaaaattacatccttggctttttatgaagtaggtgttggattgaatcactactggaagaagtatggcatcgcaaattctaagcagtggtcaaaggatggatctgttaaattagaaaaatctctaaatttataaaaagattttagattcctttattctaaacaattgacctatttgtactcatgggacaatcaaatttcaaaggagatatgtaacgatttcatggcttgcattaaaaatccttctgataaaattaaagataaaaaatctgaccccctgccaaaaaaatcttttgaagttcatactgcctgctttcaatattctgtgggattcacaatgaaaggtgccttatattgtggcctagcttcaagtttatgccttcgccaccatggcctgggttcaattcccagtcagggccccagcgcctttggtttaatgtttgcgtggcatttgacttttttacctatttagtattggtgagattacctttggtaaaaaaaagtttaaagagtggaaatcgcaattctttgtgttggctaaaatctgattataagagatctggaaggttttatttttctttttcaaagagctctatggtcagaagtcggcttcatgaaaagctaatatttaattatatgtacatacagtctttctggattttctcttttgcctcctgttttgaaaaatatttggatttgagtgaaactccgttttagaaattaattgcttggtacaatatacccatgtaactaccctgcacatgtaccccctgaatctataataagagttgaaattttgacaaaataaaattagattttgaattaaaacaaataggtgcttggttcctctgctcacttctttttaaaaggaattcctctcccatgtacttcttcttttcccttctttaccttccttttggcatctttggtatcacatgaagggatctagagggaattttaagtgactctgaaattccttgagaaatacacaaaaagatcccactcaccccttttgggggtctcctgttctccttgtggagtccagagtcagggacaggctcctccaggtctgcagctctgctctcttttatttcatcttggctgattgctttggttttgtgagtaccaggcattactttgtactgtgagagacacgtcctttgtgagtgcaacggctgctgggtcactggtgagggctgcagtttggagatggctgagagccgttgcaataaatggttgtgattgcagggggctccttgtttctttgcaagtttagatgagaaaggtgcagtttggacacagtttaaaggctgtgaaaacaccaccaatgaatatgatttcctttggggatggtctgattaaaagtgggctgattgttgctgtgctactagccttgaagacatgtttctacagcattgtgcagtgtggaaaaattgtgtggcttggtcttgtggcatgtcccttcttttagagacctcagattcaatgtgaaattcgggatttttgattttcaaagatctagatgccctgccttccagatgtgcctactcttcacatattttaaaattagatcctataaactgcaaatactttgttggcttctgtgagatcagaggtccagttagaaaaggaagacagtttgttaaaattaaaaactatttatctaatctaactagattggcctccaaatatgactttctgacattcagctggttactctgaaaagatttctaaatctcttgaggctcatctatatgtttccttgcaaagaaaaaaaaaaaaaaaaaaaagcaagcccaagcactagtaagaaaaagatttgcaatgtttcatgaaaggagtagatgagtgaagcatttatttgtagatactgggttggatacctgtgcaaagaagaagaggtcaataataaaaattgccaggggatttcttggaacttaacaagctgaattaaatatagaaatgtcaggaaatcaaggcaggaaatactcacttgtggttaggcagacagggcagggttctgagcttgagatggagcaaacagttgtggtgggtgaagttcacatgctttagagctcagctgtcctagtaaagaagcctaagagtctctaaagctcttatgagaagatggattttttttgcctagattaaaaggttaaagaattgctttaagttggataaaataaagctaaatgtttaagcaagttgtgaaaggtttatgaaaaaattaattaaaatatttttgtgtgtaaacatattgactaaagttgaaggggtataattcagcatttctgtaaattgagcattgaaataaaaacacaatgggtttctcttagagcactaacctgctctttaacaaaaattgtaaagggttatagaaagtctataaaaatgttaccttatggtcaaacattaaaattgggtaaatatgtctatcaggttttattaagaattaggtttaacattaatagtacactaatgtaaaggtgaaatttggcttatttggtacaaaaatcatacaggaagcattgtgaaatataaaatgatttttagctttctttgggctatatttctataaatatgttattgatgagggttccaaagttatgggagactcctataattctgctatatctcagtgtacattatcagtcataattataattgtcatgttaaattattgtgggccacagaggtaacagatttccttgtcaattgtgtctttgactatgactaccctaaaacgttcagtcacccatatacacatgttaccttgttttggccctctttagaaggtaattttataatcagctataaagccctaacaggtgctcttaaatgcaaattttgataactttggagattgtgacatcagaagagaggaaaaatgttcgggacacttggagagctaaaatgttcattgatatcaagcaggacaggaattaactgcatgaagtgaactaataggaggctgaagtgatctttttgactttttgcttaaaacgttgctgatcctttgttttgcttttcagagtcaaggcaaattttcttttgagctattgacagcttttaacgattaatcaaaatatactcctatgaacaccatttggagcattatttgtttctctctacccgatttccccagaatttggaaactatttgtgggtattcttaatttatggcaatatagttatttgcataagtgcaataagaatgtgttttctttggtaacaggacacaatttgaaaaactggttattttaccaaggttttgaccagaatgctgtgctttcctttaaggaatcaaacttgacttgtggagctaataaagcctttggaaaactgaccttatatcctgtgaacacagtccctgtacagggttactgatctgtgggaagaaaagaatgtcacattctgacaggtcaggaatcccaagttatcttgaaacttcaagaggacaggaattcacccaaccatatgtatttgatggtagaaatccatggcaggggctcagctttaaaaagtcttatctcagattccttctataaaacaaagtcccattaaaaccaattttaaaagcctatgtgaaaaataattattcttgctgcacctcgtacaaataaagtggcaaagcataataaagcaaattggtcctgtcgtaatttgtctttagtaaaaacgggaaactggggtcgggtgcagtggctcactcctgtaatcccagcactttgggaggctgaggtgggcagatcatctgaggtcaggagttcaagaccagcctggccaacatggtgaaaccccatctctacaaaaatacaaaaatgagccgggcatgatggcgggtgcctgtaatcccagctactcaaggggctgaggcagggaagcggaggttacagtgagtcaagatcgtgccacttcacgacagcctgggtgacagagcaagactccatctcaacaacaacaacaaaaaagggtaactggagagagggaagttatgtttcaaaaacttttggaaactatagtacacctgtttttaaattctagtctggcattcagtttttattattttctacagtttgggttaaattcgtatttctctggctacaagtctcctaaataatcttttcatttgtttcctttttctttccctttttccccatttttcttaattggaaatcactgaaacctaagctgtgctttcttaaagccctgtgaactgaagactagacaaccgaaacttctgaaggaagtagcagcaacctatttatatgtgttgctgttgcctactattatgttttagcaggtgctgcctctacacccccgaaacagagagtgctactgggaacaaatcgactttttccactccagtgctgcattcggtgccccataacgatgaccccctctcagcaggaagtagccagaaagattacaatgctccatctccctatgattcttgtgataaataaatatacaagcatgatagaaatcatgcgcaaattgacagtggggattgtggcaggccagatttcactaatggaggtccccatcacaactacttcagtactgactgagtggttaagttcagtatcaaaagctgaaagtgccagcgcctttctacaaaggctagaatgtaacaaaagcccaccaagggttttacctaggcctttcctgggccttacagcatgacaaaacaaagaaggaattcttaaccagacctgtttaggattaaacaaatttaattgggggtctgaagaaactcgccaggcctccacaaacaagttcattgggggtctaaaggaaccccccccaaacctctgtgattgagcaggagacaaggtcagggtaattgccccagcacctggactcatttagatttaagtaaatgtactgaggctccagagaaaggtctccaagacttagactagagttacagattaaaagaagttaatcacttatatctttagataaatgcacactgacacgtagacatacatcttagaaaatatataagctctggaaaaccttgtaatttacagttggtctggagatattttctgggccttctctctgtaaccggttccagaaataaaaaactctcttcctccccagtttatctgcatctcgttattgggccgtgagaaatagcagccagaccctgagtttggtctgggaacacactggctgggcttcctgcctggcggtagagcttcactgtcctccttcccagccaaaatgtggcccttgaaggcttcctccccaactgaccggttttgggttctaggtactcagggaacaccgtcttcaaggaggccattttcatactgttcctggtttgatttttctgaaattaggaaatgccccttgaggcatccaggattgtctttatttcccctgaagcttcccctcctgaagaaaaaagttctcaaacaccctcaggactcaaaccccaagttcaccctgtgaaacattcccatttcctaaacccaggcaggctcatggccctcagcctctcagaccccatggaaacctcctcccccacttcacgggttctctccatattgagagcctcccctcctcggcacacaacccagagactcaccccaacatgtgtagcaaatcaccctggaaacaatcatggctgaacgtggtagcccatgcctgtaatcccagcactttgggaggcccaggaggtggatcacctgaggtcgggagttcgagaccagcgaggccaacatggtgaaacctcgactctactaaaaatacaaagttcactgggcattgtggtgtgtacctgtaatctcaactactcaggaggctgaggcaggagaatcacttaaacctgggagacagagattgcagagagccaagatcgcaccattacactccagcctgggcaagaagagtgaaactacatctaaaaaaaaaaaaaaaaaaaggaaaaggaaaagaaaaaaaaaatcatgaggcaacattgcatttaacaatattttatttatcaaaagacacttgtctttctcaggtaagtgaaggtctagagatgaaacgagtcccgatgtaaattgccccatgggcattgctgagatcacaagatcatcactgcagcatgcagcacaatagtaaatttctcaggatggaagttcaacaatccaaaaggtagtattttttttcatgatgctcagtccatcatacgaaataaaaataaattccttttcatgatcatccattcagtagaaaaaatgatagtaaatttgttctcatgaagatttttaccgtaacatataggatttatcgttattattattattctttgttttttgtttttttgaagcggagtctcactctgttacccagtctggagtgcagtcgtgcgatctgggcacactattaacctccacctccagggttcaagcatttctcctgcctcagcttcccgagtagctgggattacaggcatgcgccaccacacccggctaattttcgtatttttactagagatggggtttcaccgcattggtcgagctggatttgagctccggacctcgggtcatccgcccatctcagcctcccaaagtgctgggattacaggcgtgagccaccgcgcccggcctcaatttatcattattcacgcatccacaaactgggttcttatattttgtacgtgattttttccattgaggagagatatctgtgcatattcatgctgctcatatttcatccacaaactcggttcatatttcatccacaaacataattttttccgttgagaagagatacttgtacatatttatgctgttcaaattcacatttcatcattcttttacaagaaatagataatgtattttaaggttttccagtggtattacagatattttactgggtgtatagatagaaattaaaccaaacttctttgttctggccgccagtcatgcatcctgttttcaacatagttcacatacaactggttgtgtaaaaatgaaattattttgtttagtacaatcatcaacagttggttgattagatttttaattatcaagttaatcattgtcattatgcttctcatcgcactcgtcattaattgctgtgggaggaaatttgttatgttccctatgagagggtgtatcacaaattcaaataagaattcaacgacaatggactgtataaaggaaataagcaagtccatggaaaacatatttttttccggaaaggattaaaatatttttaaaaaggaattaaaaaaaaattgggcacggtggcaaatgcctagagtcccagctgctcaggagatggagacagaaggattgcttgagcccaggaataagttggaggctgtagtgaacagtgattccaccactgtactccagccagggcaatagagggaaaccctctttctaaaaagacaaaaagaaacaaaacaaaacaaaaaaacaccacatcaaaaaacccaacaacaaaatgaaaaaccaaataacagcaatacaattggagctattcgatccaaagaagtaaatgaaacataaagcaaataaaagagaaaagctaatacctgtgtcctgcaggactcagtccaagttctgctctgactccctcctggtgagccaccccttaaaaagtcacttggggcggggttactttgacagacagtcttctgtcaaagagggaggcggtaaatagcacttttttttttttaatttaacgcctttccaacaaattagcggctatgttgtctaagagtgcaaatgtcagaggtgggtacaggcagcaagaccctccccacaggggcagcagaaggaggaatgactaagggaacaagactttagtgtgctcaactacacaggacaggaaacagatgctttttacaaaagctggtggacttgaaggcagaatattttcaagttcctgtaactgcgaactatgacctgtagcctgtgagagtgactttctgtggcaaaggagcttttgtgaatgtgaggaagttaattatcttaacagtgggaggttctcccggcttatctagctagaccctcgtgaaatcccaagtgtccttaggaaggggaagcagagagagatttgagtccagaagaggaagaaggtgatgtgaggcccagtaggggaacaaagggcgatggcatgtaaacacttagcccccagaagtgggagagggctggggttcatcacaccagaatccctaacaatcagccttattttaattacccttgaaatggaaggaggccttagagagccagaggcttggaggggcaccctctgctgcatacacagatcccaactgctgtgggctccaaataattgcaccagggaaatcacaaattatcaaaaataaaggatgtaaagcttttaaaaaatattaaaagcccaacaaataaaaaaagttctaaatctataaaattgacctcagtctgtatatttagatgagtcatgtgtatatagcgtttcacttcaaaatatatgataaatctctcattcattggcttaaaaataaacacttcaatcaagtctttatcagaaaaattgaaacgttaactcaattgccttttagttcatgtgactttacaaaacttaaaacaataaagtcagttttaaaaattattagtaaagtaaaagaaaaatatcttcacaatgtagacattttgtccacatgagacatgtgaaatattgccattactaaatatttgcaggtcaaaaactgtttccaaaacattttaaataatcatctggcctgtctgttttagagcattcaattctagctgaggtctggggacatgtgaaaggagccacggcccgactccgtgctgggaagagtcagacattttccacagctctgtcctttgctgtgggctctgcaactcctaccaattaaaattgcttacgtttttgttttatttttactaaagaggggttcctaaaagctaacattatactgagtatatgtaactaaaactactaagaaaacaatttcacaattatacaaatgtgccaagtaaatgaaaaaataaactgtattttaataaaggttataaaaagaaaaacatatagtggtgtgaggactgtctcaggtcttcactgagcaagggatcatgacattctatggcggacagctgaccttggctttctgctcctcttgattatgtctactaagtgacatacttactctttttccacctgtcttgcctctaagggtaacaggttttatgagatccctcctagtgctttgcaggtcagcctccctttgctgcattccaattttactgcctataccctccagctggcttttgatgacaaaagtcctggtcccagccattctcagattctgtcatccccgtgggcactatggagctcagcactatgggaggttccccaaaaatctcgttttctatgaggaatggccaccacctgcatctcagtgatgctagtgacccctttcctactcctgtgctcactggtcctcatgaagatcctggttggtctgtagccccctatttttcctattaaagagaaattacagtaagacccatttgtgtgcaaaatcaattttaggcttattacacttggcctgataatttgcataaaatgcagcaagaattcatcggccatataggctacttttgagttaattttcctgggtttttacctaaaaatatactattttggttagagtcttgtgaaaataaccaatgtgttcaattgttttattttaaaaggctcttactgaacactataaatatgtataagttgaatatacaaactatattgtcataaaatcacaacccaaaatgtggagaacgcagagggaaaggtaaatttgctcgcaaaaacatacttcacccaaataactggaaaaaaaaaaagactttcatgacccttctttaaccagagcagcagctttcaaacaaggtgtttgccttggaaatgccattcacaagccaaacggcccttgagagctgtctgtcaggcactgtagaatctagcagctcctcacagagttagaaatagtttcaggaaagagattccctgcttttagtaactgcactttatattcccagatagcgagattgtatgtaaaccatttttatcttattctggaactcttttgggtactttttttttttttttttaaatgatggagtctggctctgttgctcaggctggggtgtagtggtgcgatttcagggtatgagaaaatgcagctggacctggctctttccaggaagaccctcacagccaaggagtccaaagcctggggttttcatctaattccagtgtgactggggtaggagcagctttggtgctgggtgtgtgtgtgtgtgtgtgtgtgtgtgtgtgtgtctatgcctgtgtctgtttagggtgttaggctcgtggttgtctagatacaaatgtcccagggctcaggagccccagggttatgtcaggggcaccagatgaaggtgtcaacagaagttagggcacaagggacaaaggtgagagcaaggttagattcatttaggtgcaagaaatcatagagggaggagggagaggaagccctcctgctaccaccgaggaagaagcgcagcttaaggcagaaagcctgtccggagaggaagtgagtttgagggcagggctctctgggtaaagtacggtctgggacaccagcctgggggaagggtacagaatgcagagtggcctggcgtggggactaagaacagaggagagcagctttcactgggagggtcagtgttttcagtgtccagcactgagcaaggtgagatttgggcagcttgctgtgaaataaggtcaggctctggcattgtccccattgcgtgtgtgtgtgaggggcactttgggagagtgaactctccacctccatcctctcatacgtccttcaaccgagcttgccagttaccctgattccaaggagatctatttattgttgacaatactggatcctagcagaggctgggtaggagcctgggcacaagcaagtggaggagggggcctgggcctgaaagacctgggaggtttgagagaggacacagcccacagaatggagcagatggggtagagtcggcaagcattcagggctcctagtaagttggacaatggagaccctgaaagatccagtaaaacggggagaacaaacaggtccccaactcacatccttgcagtgcctggagcttcagactccagacaggtggggaaggaaaattgagggatgtgaacatgttggagaatgtcgtgccctgaagaatgaagaaaaggggggtgaggaatgagagcaggaacggcttccagtgcctggtgcccaggagaactcagaaaatgggtgtggtggagaggaatcgaggaaccggaagtggtggaagtgtgcagggcccctccgagatcactgtgactgccaggcgtcctccctggctggagagcttcactgtcctccttcccagccaaaatgtgtcccttgaaagcttcctccccaatggactggttctgggtcctatatatttgaaggggtggcctgcctctccacacctgtgggtatttctagttgggtgggaggagagacagagaaaagaaataagacacagagacaaagtataaagaaacaacagtgggtccaggggaccagcactcagcacaccaagggcctgcaccggcaccggcctctgagtttcctcagtttttattgattattattttcattatttcagcaaaaaggaatgtagtaggagagcagggtgataataaggagaaggtcaatgaaaaacatgtgagcaaaagaatctatatcataattaagttcaagggaaagtactatgcctggacgtgcactcaggccagatttatgtttctctccacccaaacatctcagtggagtaaagaataacaaggcagtattactgcaaacatgtctcacctcccgccacagggcagcttttctcctatctcagagttgaacaaatgtacaattgggttttacaccgagacattcagttctgaggggcaagcaggagacagtggccttcctccatctcgactgcaagaggctttcctcttttactaatccacctcagcacagaccctttatgggtgttgggctgggggacagtcaggtccttctcatcccatgaggccatatttcagactatcacatggggagaaaccttggacaataccccgctttcaagggcagaggtccctgcggctttccacagtgtattgtgcccctggtttattgagactagagaatggcaatgacctttaccaagtatactgcttgtaaatattttgttaacaaggcacatcctgcacagccctaggtcccttaaaccttgatttcatacaacacatgtttttgtgagctccaagttgggtcaaagtggctgggtcaaagtggctggggcaaagctacaaattaacaacatctcagcaaagccattgttcaaagtacaggtctttttcaaaatggagtctcttatgtctttcctttctacatggacacagtgacagtctgatctctctttcctttccctacatatattcatggaccacagtcttcaaggagtccatttcctcactgtttttggtttgatttctctgaaattaggaaatgccccattgaggcacccaggattgtctttacttcccccagagcttccactcctgaggcaggagcttctcaaacaccccccaagactcaacacctaatttcaccctctgaaaccttcccatttcttaaatccaggcagggtcatggtccttagcccctcagatgctgtggagaccttctttccctttcatacattctctcaagattaaaagccacccctcctcagcacacaccccagagactcaccccaacatgcattgcaaatcaccctggaaacagtcataagaccacactcatttaataatattttatttatcaaaagacactctttctcaggtaagtgaagttctggagaggaaaagaggagtcctgatgtaaattgccctgcaggccttgctgagatcacaaggagattgttactgcagcttgtagcacaatagtaaatttcttctctggatggaagttcaacaatccagatcgtagtatattccttttcattatgctcagtccagcaaatgtgatgataacaaattccttttcatgatcatccattcagcagagaaaatgtttgtaaatgtgttttcatgaagatgtttaccataacatacaggatttaccattatcaatgcatccacaaactctgctgttgttttttatacataattttttccatcgagaagtgatagttgtacatattcatgctgttcatatttcaaccacaaactctgctggtttttttatacgtaattttttccattgagaagtgatacttgtacatatttgtgctgttcatatttcatgtttcatcatccttttacaataaataggttatattgtattttaagtttttctaactgtagtgcagaaattgtactgggtgtatacatagatatcaaaccaaatttacttgttctggctgataatgcatcatttatttcatagattatgtatttctttgacacatttcacgtacaactaattgcataaaaatgaattttcttttagtatagacatcagcatgtgcttaattcggaatttaattgttgagttaaacatcgtcattgccttttccgttgttattaattgctctggtgggaattttgttatctcatacataagacagtgtgccacaatatctcttaaaatttcaatggcaataaactttatatttaaaaacagggaatctatggaaaacacatttttttctaaaggattaaaatatttttttaaaataattttctaaaaagttaggcacggtagcaaacgtctagagtcccagctactcaggaggctgagacaggaggattgcttaagcctacgagttgggggctgcagtgaactgtgattgcaccactacattccagccagggcaatagaagttaaccctttttctaaaaaaaaaaaaaaaagaaagaaagaaagaaaaaaagcaacaacaccaaaacctcaccaacaaaatggtaaagaaaaaaaaaacagcaatacaatgtaagctatttgatccaaagaagtcaatgaaatttaaaacaaatgaaagggaaaaagtaatacttgagtcctgcaggactcagtccaagttctgctgtgcctccctcacggtgagccacccctttagaagtcacttgggtcataagttaacccgataggaagtgtcctggccaatgaactagggaggtggtaaatggcaccattttaaatttaaattcacggccttttcaacggatcagtagccatgttgggtaagagtgcaaatgtcagaggtgaaaagaggcagcaggaccctcccctagtgcttgggcaacagaaggtggaatcactaaggggacaagactttagcatgctcaagtacacaggacagaaaacatgctttttacaaaagctggtaaatatgaagagggaacattttcaagttcctgtaaccaagaactaccgcctgtaaccggtgaaagtgactttctatggcaaaagcgtttttgaaaaggtgaggaagttaaatatcttaatgttgggaggttcttctggtttatctggctagaccctaatggaatcccaagtgtccttatggagcggggagcagagagagagatttgagtccagacgaggaagaaggtgatgtgagtctgggtgcgggacagggggagaatgatgctatgtggggatctgggctggggaatgacttagctgcatgagcggagtgacttagactcctgaactagaagaaatctagggctcatcacctcagcagccctaaccatcaaccttatttttattacaggtcttccatcgacggactccctaaaaagccagcggcgtggaggggcgccctctattggacaaatagatcttgactactttcggccctcaaatagcctgactaggcaaataacaaataataataatttttttttaaatcatggaaaatattttaaaaaacaattaaaaagttataaatctataaaatctgcttctgtctgtgtgtctgtatatttagatgtctcatgtgtacataatgtttcactaccaaaatatatgatgaaaccctcattaatcggcttagaaaactaaacacctaaatattttctcagaaaatacaaaaactttaactcaaatcccttttaattcacctgactttaaaaatctttaaaaaataaagcatgctttaaaattattagtaaagtaaaattagaacatcttcagaatttagacatttggtttaaattatacaggtcaaatactgcccttagtaaatattttcaggtcataaacaactcctgtaatcttttaaataattgaattacatgtctgttttagagctttaagttctagctaaagcctggggacaaatgaagggcaccatgccccctctctgtgctggaaagagacattttctacagctctgacccttgcagtaggctttgcaactgctacctatcaaaattgcctacatcctaagtttattattaaaaggagttgcttggagttaacattataatgaatatatgtaactaaaactatttctcatacaaagtatatgaaaaagtagaatgtatttttaataaaaagttataaaaagacatgaacatgtagtttttataaaaaacagtaattttgtctagttttgcagttctaaaaagttatgttaaattcaaaaataaaaaataacaagacaagactcaaggtttaaataagttgtaaaagatttgtaaaaattagttctataaaaattttacaaaaaaaagcattggttaaaatttaaggaattattttgtttttacagaaattaaacattcattaaaaacactctgatacaaggccttaatttgggttcatgtatcagaatagcagggttttcttagaatattaatctattctttaaaagaactatgaatgttatgcaaactttataaaaatcttaccttagagtcaaactgattaaaattccatagattttacgtaaaattttattaaaaattaacttcaacaaaaataaaatttgattttctcctttaaacaaaagttttgcgtaatattaaataataaagcatttttgtttaccttttaaactataaacacacacacacatacacatacaccaacactaaagtcagctgacctcatactgtctttattggatattcttgtttaaaaaactatcttctttggaaaataaagttttttattttaaaccatattttaaattatcattttgactaaatccataacatacagtgatctgtaataattctattttataatatcaagtgttttgaagaactccaggaacagccatgagagaacactgtggtttagtaacactttatttcctcagtttgaaaatagttgtctttcttggggaggccggtttcagcagatgaaaacaagagtcatgatgaaaattacccagcagtggttagtgtgaccataggaacattgtcatcaggtcagcagaaaacatatcagcaaatttttctcatactggcagtgtgtaggggtggatgtttacagttcctgaagccccagtggtcgtgtggtcttttagttttgccatttataggcaacttgtggtaactagctcaattagacacattccttatcacaaggacagagggctttctgtatcctagggttcttgccttggcattccagaagaatcaggtcacacgtggacgtggagaatgagtgcaaggttttattgagtggaagtagctctcagcagatgggggagccagaaaggagattggtttctccctggattggggccgttcagcagccctggctctcctctgactgccccaggcaaaatccacatcgttctataagtcggtgccctgctggtgtgctggtgcctgttgtcatgttcctcttcatgtccagccgcctgtgtgttcctccgctgatgtgctcctctcgacgtcaagcctcctgtgtgtctgactgctagggtcttggggtttttataagcacaggatgggtcttagcaggccaggatgatcttgggaaagacaacattcggtcaggaaaacaaaaatgcctgttgtcatctaggtccgtggggacaagcccaggtgtggagcttttagccagggaccacagcctcctgtatccaacacttcccttcaccttttctatatcattcaaagggatcatgcccttcccatcccagcacttcactttcatgtcatttgccccctctgaagaggtacatctaactgccattagaatatggatgatgaccagtcttagctgcttcctgctgaaagggggcattgttttgggggaaaacggcagtcagattcctcccaggggtctctataataaaagatcgaggtggctactttcaggaggtcctctaatgtactatctggtcccaagtcccatttctgcaacctcctcctgatgtcaggagctgcctgagtaataattttatcctttaggattatctgtccctcgattgaattaggagatagagaggtgtgatttaccaaggcctctcttagcctctccaggaaggcagtgggattttcatcaaatccctggttaattatggacaacttagtataattgagaggcttggtcttagacctacgtaagccctctattatgcacacctgaaagtgtctcctcttccagtcttccatctcattattgggatcccatttagggtccttcactggtgctacttctcttccagttggataatattcgctcccttccctgatgctataggtgatgcaaagctcatccccaaatctctctgctgctggcagagcagcctgcttctcagtgtctatcaggttctgactcaaaagtaacataacgtctctccaggagagttcaaatgttagggtgaaattctggaaagcttctatatatctatcagggtcatctgaacacttgcccagatctcccttaatttgctttaagtcttgtagggaaaagaggacttggaccttactgggcccaaattcactgggcatctgtaggaggggcaagagtgagactgggcttgtttgggatgaagatttctaggaggggccaggtgagaggctgaagctggatacggaggttggggtggacccagaggagcagggcttgagggagctggcacgtcagctgggggtgcgtctgggactcgtgtctttaattccctgggcttgaccctggcagccttccccgagacagcaaacaggagggctggaacaatcctacatgtcagcaaaggtctggattgctttgcaaggtatagaaagcctgcacatttggggcctcagaccatgtgtcctcacatccagagaaaagttctaattgcaggatggtattgaaatgaatggtcccttcctgaagccaagccagtccttcctgtaaaccataatttggccaaacctatgtgcggagggctatgagatgcttttcctctggattctgagggtcaaaacagtcccaatggttcaggatacactcaaggggagtacaagctgggggtggtgaggagaactggctgcccattctgaaagacagggaatagaggtgttcctcatttcccttccttcttttggcaaaaagctcagggtgtgatggggagggaaagcaagcatcttcacttcactttccacctcttacccctgcgccctggcaaccttggcaggtgccggccacaggtacaaatgcggtatgtacccatgaagcagggagaacctggagattaggaattaactgccctcacctatgtttccttttctccctgctgttgaaaaactttgagttccctgggcctttttatcccatgaggcatggcctccttctgtgggatggggttcagtcagcaggaattggtcctgtccatttacattgtgcctgttgcctggctttgaattcctcagacctgctttctctttctagggcctcagcctgaagcttggaattgagtttgggactgaaaaagcatttcagaggctgtttatatccatttagtgcctcaaataagccctgctgaatttgcaattatcagccagcaggggtcactcctctgttaacttccctattagaaacagagcggtggggattctcacttagaaaagaaaaaaagagaaaaacagttaaagaggcaaaaagtggggaatgctgggggaagaaccccttgcttagtgcaagtgggcccctctaatccttataactttcccatccttcccccagttcagaccaggttgaattccttggccatggaaggaaaggttccattgatgcagtgggtgagaagcactctgtagggtcctggctaccatcggttttctcacacccccctcatcccaggcagtggagggagacacttctgcgacattgctccccctgccccttcatggctattgggtgtggcctttgcctgctgcaggcatgcctaggtgctggagctgggagggaaaagggtaaggagaggtgccctggaagccgctcatgcctggggctgtcaaggtggaggcatacatggcacctctaggaaaaattggtctgatttgcacctttggcggctgagccaaatgctcattttacttagtaacattgcctcagcctgtagcaaaactcttaacattataaaggaagagataagatccatttcaaataatgtgtgagagagaaaagagatgaaaggaaaacagagtcttttacctgcaggaaagggagagaagtggcagagttttggaagaaaggcaggcccaacagtttcccattcactcacactcaccttccgagatcccagacgagccaccagttgaaatgggaaaagtttccttgtccccctcacaggaggtggagtgggggtgtggcttgcttctttagtactccgctgctcaaacctctagggaagcatacagactggcaagttgtggggctacaaccccatggcagcatctaggggtagatgtttacagctgctgaagccccagtggacatgtggtaccatgtgctcttttagttttgccatctataggtggctttgtggtaaccagctcaattagacccattccttaacccaaagacagagggctttctgtatcccgcggttgttacctaggtgtaccagaaaaatcaaatcacacgtggtcttggagaatgagtgcaaggttttattgagtggaagtagctctcagcagatgggggagccaaaagggagaatagttttcccctgaagtcgggttattcagcggcccaggctctcctctggctgccccagccaaactctatgtcaatccattggtcggtggcctgccagagtgctggtgcctgttggtggattcctctcagcgtcgagagtttttccctctcaggaaagggagagaagtggcagccacccatgtgttcttgcactgatgtgctcctctcgacgtccaacctcctgtgtgtctgcctgctagggtcccagagtttttttaggcacaggatagggcatggtgggccagggtgatcttgggaaatgcaacatttggtcaggaaaacaaaaatgcctgtcctcatctaggtccaggggcacaagcccaggtttggagccctagccagggaccccggcctcctctacccatcactttccttcaccttttctgtatcattcaaagggaccatgcccttcccttcccagcacttctcttctgtatcaataggtgatgtttttaaaatttcccaactctagtgcaggcatggtactagacatatacatagaaataaaaccacacttattcttctggctggcaagacatagtatttttgccaaattatgtgttgttttgaagcattttatgtacccctggtcatataaaaataaagctattttgttcagtacaaacagcagcattttctggattagaaagttaatcatcttaaaagatcatcacggatttttccattgcactcatcactaattgctttggcaaaaaatttcttatctcacgcatgacaaaatcagccgcagtatctcctagtaatttaatggtgatgatctttataaaggaaataagcacatcaagggaaaacataattttttttaaaaaaagagtaataaaactttttaaaagtcttttttaaaagactgcttttctaaaatagtaaaataaaactccaccaataaaaccaccaacaaaacagaaaagaaaaaataatgatatgatcggagctatttgatgaaagatggtaaattaaatttaaaatgattagaagagaaaaagcaatacctgtctcccgtaggtctcagtccaggttctgctatgcctttctcctggtgagccacctatttaagagtcgcttaaagcatatgttaatccaacaacagcagattaaaaaccaatgcaatctgaactatttgatctaaaaacataaataaaatttaaaacaaataaaagagaaaaagcagtacctgtgtcctgtaggtctcagtccaagatctgctctgactcccttgtggtgagttagccctttagaagtcacttggggtggggcatatgttaattccactaacattggttctggccaatgagtcaggaaggtggtaaatggcaccttttcttcttgctgatttctttcagttcctttggagtctggacattagtcctttgtcagatgcctagtttgtgactactgtttcctatactgtgggttgtgtgtttaccctgctgatatttcttctgccttgcagaagattttcggtttcattaggtcctattgatcttattctatttttatatttttgcgtttgcttttggggcattagtcatgactacttggcctaagccaatgtctagaaaagctttttggatgctatcttgtagcatttttagactttcaggtcttagatggaagtttttatatgctttgttaaagatcaggtgactgaaagtaccgggctttgtttctcggttctctattctgttccattgctctatgtgcctatttttatacttcctgcaccatttattgaataaagtgtcctttccccaattagtgtttttgcatactttgttgaagattagttgtctgtaagcatttggctttatttctgggttctctattctgttccattgctctatgtgcctatttttatacttcctgcaccatttattgaataaagtatcctttccccaattaatgtttttgtgtactttgttgaagattagttgtctgtaagcatttggctttatttctgggttctctattctgttctattgctctatgtgcatattttataccagtatcatgctattttggtgattgtagccttgtagtataatttaaagcctgccttcagatttgttctttttgcaaagtattgctttggatatgcggtcacgtttttggttttgtataaattttaggattcttttttctagttctgggaaggagaatgatgatattttgatgagaattctactgctctgtagatggctttggagagtatggtcactttcacaatattgattctacctattcataagcttataatgtgttcccatttgtttgtgtcaactgtgatttctttcagcactattttgtagttttccttgtaggaaacttacattaacctacttggttaagtatatttctaagtattttacttattaaaaattctcagggaaatgcaaagtaaaactgaggtgggaaattaaagaaaaataaaattaaaaagaaagggaaataagctttcttgtattaagctaacttgtcccagaggcagcaacaggcacagcccagacccaggaaaagtcttgataatattatttattgtattctggagactcttccagcactccttcaatgtagggagaagaaaaacaaattttcctttgttttatggtatgagtttatagattcttgttctctttaactagtaacttcaagtattctgttttatctaagaagtatggcaaaggtcatgagaagcctgagcaggcctgaactacagctctctaggcaccatagtgaagataaaccaatgcaagcctctttagagcaaaacctagataatagacatctgggttgcatagcaacagttatgtgcaatcctgagttatgaacctgttacaatttgattaactgtctttttcctgcctctgtatccctgctttcacaccactgtaagcttgcttcaagctggcccacccccttttgtgaagtgtgtataaaagtcaagtgctgtctttgttccaggccctgtctttggacgtgagtctgctgggcctgagagcactcaataaaagattctcctgttttaacccaaagcctctctctcatcctcctaaatcccacaacaaaaccacaatgagatgctatcttaatcttgctagaagcccataatttaaaagtcagaaaacaatagatgttggcatagatgtggtcaaaagggagcactttgacactgctagtgggaatttaaactagtccgaccactatggtaaacagtatggggattccttaaagaactaaaagtagaccattcattccagcaatcccattactggctatctacccaaaggaaaagaagttattccataaaaaagacacaagaatatggatgtttatagcagccgattcgcaattgcagtgatatgggaccaacttaagtgcccatcaacgaacgagtggataaagcaaatgtggtacaccatggaataatacttgataataaaaaggaacaaaataatgtcctttgcaacaagttggatggaactggaagccattattctaagtgaagtaactgaggaatggcaaatcaaatattgaatgttttcacttttaaatgagagttaagctatgagaatgcaaaggcataagaatgatataatggacttggggactcagggggaaaggttgggagggggatgaggaataaatgatgacatattgggtatattatacactgctcaggagacagatgcctcaaaatctcagaaattaccactaaggaacttttatccacataaccaaaaaccacatatattccacacactattgaaagaaacataaacattattttaaaaaataaagccacttttaaaattagcaaaataaaataaatatgtcttcagagtttagatattggatccaaattagacagatcaaatactgcctttactaaatattttcatgtcattaacaacttctaaaacctttcaaacagttttttgacatgtcttggaaccatccatttctagctaaggcctgggcacctgtgaaatagggccatgcccccccttatactgggaagagtaagatatttcaagactaagatgttttctacagctccatctttttctttaagctctacatcaaggacataattaaaattggttgtctcctaagtggtttactaaaaatgcatacttaagagttaccattataattaatatttgtatctaaagctacttaaaaattttcacacacaaatctgactgaacaagtaaaatatattttaagtcaaagtttataaaaggacatgagaacatagcttttatgaaaaaattagttttgtcaagtttagaggttttcaaatattttaaattcaggaaataaaataacaaaaagacaaaagaaaatggttgaacaacttagaaaaggtttgttaaaattcatcttataaaacaatctacatgtaaaaagtgggctaaaatttgaaagagattatttaggttttccataaattaatccagaaggggtaggaagtcttaagaatgaggaaggacaggaggaaggggaggtcatcctgacactgcagaggcagaagtgcagctgaaggtatgaaggctaagaggggaggggagtttgagtgctgctgcctggctgtcagagcagaggagggtcctgggcaccagacttgaggaagggatgaaaatgctgggcagacctgtagtgggcccttgagatggcagatagtggtttccagagagagggccattgttttccagtgcccagcactgagcagagagagttttgggcagtgtaaaaaaaaaaagagaacttacctctttctcgttttagaaaaagaacagtctaagaatatcagcagggaaactctcagtgcttcaaggggttaaacgcccttttggctttcttgtgttggtttcatcatagaggaggagaaacttcttggaagtgttcctaaaaacacaacacgtctgcttctcctttcaaaaaaggaagtgctaaaacacgaacactctagatccaaatattaatacggatgtctaaatgcttccgttttccaaggggcagaaagctaaaggttgtaacctattcatttcagtcaaagttggtgaaagggaagcaaaggaactgggtggggcttggaaggatgacgaagctcaagctcattggccagcaacctctctcctgggggcgggaggggtgagcatacgtcattgctttggcttctataaaatgaggaggactcaccgagtgtgaagagtccttctggtgattgcagctgagagcacactcacgacgttctgcaaggattctctgattatgattctgaagggaaaagcgatggaatggacagcagagattgtaattttctttatcttgaattacggaagaaagtatctaggacagaaatccacgacaagtccttggaaccagcagatctcttcgttcacggagacgttgacgtattctctattgaagaagattcttaccttcttactggacaaggttttgtcagttctgcgtgactggattgtccgggagactctgaggaaactgatgtcacatgtttttccaaagaagatgtttctggaaccaacaactgtgattgtggtttgaggacttctgagagttccagtacaggaaataagcagaacatcagctggaggctaaacggatccagacttcactcttcacttcccttcctattcagtctattgtgcctgctgactgagaagcttggctggtatgtgagcaaataaacggaactattcagaaggagatgttgacatattctgtattgaagaagatccttatcttctcacctgacaaggttttgtcagttctgtgtgactggattgtccggaagactctgaggaaactgatgtcacatgtttttccaaagaagatgtttctggaaccaacaactgtgattgtggtttgaggacgcctgggagttccggtatgcgaaataagcagaacatcagctggcggctgaagggatgcagcctccactcttcacttcccttgccattccatctattgtgtctgcctgactgagaagcttggctggtatgtgaggaaataaacggaattataaacaaggagattgtttctcatctacttcattctgttgtggcttttctattttggggttcagggtgtgtgacaaggaccaaggagatgaaaggtttcatgatggagaaagcccaggcaatcagattgaagagctatccacagggaatcttggctgctgaggggctgcaccctgcaacggactgaccatatgacagaaaagggttttaaaggctcaacttctggactgagaacccagagtaatttgggaacctcctctgtgaggagatatgaaagctgggaatcatgacatccctaggaatggaaggcacatttcctgatggaaggggtgctttggaaaacaggagcagagtagacacagcagccttgtggatacgggtgggcagcatgcatgggtgatgtgaacgtggagtgtttgtgatcgaaactcaaaatgtctgacaaagtgaaaacctagaaaccacaatgaggaggaagagtttgtgagggcaatcactctccccatgtgtgaaaatcgggggctcttaaaatctcatctggagaggtgcagtctaccaaactctgggactttagcctccccttttaaaaaaccgtgcatcaataccaacgtccgaaaccacagaaataacacctggcttgcatggagacaaggacaaaaagccgtcatgatgagttgttctgctcacttgctgcctctgttcagtgcacaggatattgtccacccactagcaggctactgcaagagaagtgtgcaatatgttccctatgtgccatatatgtgccatatggcccatatgacaactgagtcagaaaatatctgatgccctcagagttacactccacctggagcttgcccccagccatccaggacctaggctccctaccctgtccaattttctggtgttttgggggcttcattctctaaggtgtgcccactctttactcaaaccaaaacacccacatattcctgcccatgaacaaccaatcaaccacttctcagttccacatcctgctgttgggtctctagtggtgacactgtaactcccaggtcatagtggtgacactataacacctagctaaattgatgccttgtctctaggaggccatgggctcctgcaggtctcatctgactctctgtagccttccctgacaatgctcacaatacccaagccagagccacattgacagcaagctgctctcatcttacctttgccagacctggccactggaaaaggctgaccctcatcctgcaatgcctatacctccaacctttgtctcaagctggtgtcctggagggacttctaagcagaaaacagattcagactcccatcctctcctgaatggcctcatatccaattctcagaccctcagccttcattgtaaggacacttcatccatgcccttgagtattctgtctgcactgtgtattctgcaatagattctcctccctctgcgaccctcaactccttccgcagactttttgttttcttgatcatctaccatagtcttccactgggacactgccaagcccattctggagagtgagttgtgcaagtacactgccccccatctacctttcgggaggtgtatacacccttctttctcccaggtctggaggctttctattttcatcctgaggcatctccacctgctcttggattcttcaaattgacaaccaccagttaacaagaactatgtgtcaccaaatagccaaacaatggcaattacaaaaataaaattaatagctgtaacccccattagcaaggatacacaaatcaaatcagggatagtgggtgaggaagtctgcctaacattcaaggaaggattctgaagtgatacaaaatcattgcctttgctatctttagaatggacactttcagccaggcacagttgctcagcctgtaatcccagcactctgagagccccagttgggtggatcacttgaggccagcagcttgagaccaccctgggcaatgtgcagaaaccccaactctactaaaaatacaaaaatagccagttattgtggcacatgcctgtaatcccaactccttgggaggctgaggcacaagaatcacttgaatctgggagccagagtttgtaatgagcgaagatcatgccactgcactctagcctaggcattagagtgataatctgtctgtggaaaataaaaacattcctcttcaaagttttcttctttaaatcataaatgttggaattaatatatcctctttgaaactcactttcttcaagcttctttatttgatggtagtaaatctttgttaagctttatgaggcaagagtaatggaagaagcatattatatatatttatactctaacctcagtgcttgttctagcaagctcaggcatgcgtgaatgtgcccaggcatgttccagcccataccttatatcctttccttattgggaaatgctgttactcctataagcattcttgtaagcaacttcctctttttctttgtctccactatctttacctattgaggacagttttaggttcttagccagttggatgtagcatagactgtgaggtccaaccccagccaatggagatagcacacagcagtagcgacctcatgcttaacagataaatattcctgtctccctttgtttggggtgctctcagctgatgagcaacaccctttctaaagaaattaaagttgtcttgctgagaaaacttttggtctaaatgctgattcttccttgcagcactgaagaagaagcaattatttccaacactttctcatacacaaaaaaagaagaaggtggaagaaaactttcttgtgcaccctatccctcactcagaaagacaacagaaggctcctagtggcaagccctagaggattcatttcttttgggaaccctcttggctgggatactaggactcaggtcaaactcagcattttcagtgtgtgggaagtgtgcttgggtttcactgttacttccaataatgtgatttggtccttggggttcaccaaattttggtatggagtggtgaaccctgttaagtttaagtgtctataaaattaacaaagcaaaataaccattctgccccatggttcagagaccaaatattgtgtaggaaatgctttagcgagagaaacagagaagaataaaaaatgtcctcaagcgctgcattatttcttgttatcgtccagatcttagaggaaaggctttcattttccctcattcagtatgatattagctgtgcatctgtcatttatggcttttattatgttggggtatgttccctgtgtatgtagttttttcagggtttttgttatgaagtgatgttgaactttatcaaacgtttttcagtttcagttgaaacgatcatatgctttttgtccttcattctcttgatatgatgcatcatgttgatgatttccatatggtgcactgtccttgcatcctgggcatgaattccacttgatcatgacaaatgaatttttaatgcattcttgaattccgtttgctggtattttgttgaggatttttgcatcaatattcatcagagatattggcctgcagtttctttttttttcttttttctttgttttgttgtttgtttgtttgtttgttttgatgtgtctatgtctggttttggtatctgggtagtagtgttccatccccttttattttttagaataatttgaataagactggtgttggttctttaaatatttggtagaattccgaagtgaagtcattgggccccgggcttttctttagtggaaggctgtttattatggcttcaatctcgttacttattattggtctattcatgttttgaatttgttccttatttaatcttggtaggctgtgtgtatctaggaatttgtccatttcttttagattttcaaatttattggcacataattgcccattgtagcctctaatcgtcatttgagttcctgcagtaccaattataatgtctccttcttcatttttgattgtatttatttggatcctgcccctttttttcttacttaggctgcctaataatttcttaattttgttgaactttttcttttgtttgtctcgctctgccaccaggctggagtgtagtggtgtgatcttggctcactggaacctccgtctcccaggttcaagcaattctcctgcctcaccctcccaaatagctgggactacaggcaagtgccaccactcccagctaatttttgtatttttagtagacacgggttttcaccatgttggccaggatggtctcgatctcttgacttcataatccacctgcctcagcctcccaaagtgctgggattacaggcatgagccactgcgcccagcctaattttgtttaaattttcaagaaatcaacttcttctttcattgatttctgtattttttatttccattttatttatttaaactctaagctttattctatcttcttctcattttagctttggtatgcttattgcctctctagctctttaatgtgcattgttagattgtttatttgaagttcttcctctctacaccataagacgtaagcatgtcctcattatgtcataagatgtaaccacttacagctataaacttccttcttagttctgcttttgctgtatctcataggctttgttatgttgtgtttccattatcaattgtgtcagaaatttttcaatatttttcttaatttcttcattgagcaactgatcatttgggagcatatttttaaacttccatgtacttacatagtttccaaaatacctcttgtgatcaatttctagttttattccactatggttcaagaagatgcttgatattatttcaattttttttcacattttaagatgtgttttgtgacctaacatatggtctactttttttttttattaaactttaagttgtggggtacatgtgtagaccgtgcagttttgttacataggtatacacgtgccatggtggtttgctgctcccattaacctgtcatctacattaggtacttctcataatgctatccctcccctaacctccaccctctgacaggacctggtgtgtgatgttcccctccctgtgtccatgtgatctatttttgagaatgatccatgtggattagaatgctgtggaaaagactttggattcctaatatccagggagggagacgatgatattactttcaatatcacacgggtgtacacactctctgtgacattgttcctaatatccagtggaagagaggatgatataacacccagggagggagaggatgatattactcttaatattgcagggtgtgtacccatgcctatgatattgttcctaatatcaggagggggagaggatgatattactcagaatatggcagggggtgtacacacactctgtgacatggttcttaatatacaggggagaatgggacaatattactctcaatatcgcagggggcgtacaaccctgtgatttgttcctaatatacaaaaggggacagtatgatattgttcctaaaatcgcagaaggtgtacaacgccctgtgatattgttcctaatatccagggcgggagaggatgatattacccccaatatcacagggggtgtgcactttccctgttacattgttcctatgatccgagtggggggaaatgacattagtcccaatatcgcaggatgtgtacactactcccccatgatattgttcctaatatcaagggggagagaggaggatattactcccaatatcgcaagggaggtacatcctccatgcaatattgttcgtaatattcaggaggagagaggaagatattactctcaatatcgcagaaagtggacacccaccctgtgatgttcttcataatatccagggaagcagacgattatatgactttcaatatcgctgggagtgtacatcccttttgggatattgtttctaatatccaggaagggagaggattatattacttccagtattgcagccagtgtacacatttcttgtgatattgttcctaatatccagaaagggaaaggatgatattactcccaatattgcaggtggtgtacacccccctctgatattgttccttacatcaaggaaaagaaagaagaatattactcccaatatcgaagagagtgtacacccctcctgtgatattgtatttaatatccatggggaaagaggatgttgttactcccaatatcgcagggggtttacacccacactgtgatattgttcctaaaatccagtgaaggagaaaataatattgctcccaatattgcagggtgtatacaggccctcccccgttatattgctcctaatatccagcggtggagaggatattactttcaatttttgcagggagtgtgtaccccctctctgatatttttctaatatcaaggatgggaaaggatgccattactcccaatatcgcaggaggtgtacatgccctgtgatattgttcctaatatccagggaggtagaggatgatattactttcaatattgcaggggctgtacaccctctatgatgttgttattaatatttaggttgggagaaaatgatatttttcctaatatcctgggaaggaaaggatgatattactgtaaatattccagggagtgtacaccttcctaatattctaatattgttcctaatatccaggggtgggagaggattatattactcccaatatcgcagtgggtgtacacccctcctgtgatgttgtttctaatatccaagcgaggagaaaatgatatcactctcaataccgcagggggtgtacaccttccccatcatatcgttcctaatattcagagggaaagaagatgatgttactttcaatatcgcaggggttgtacacaacccctgtgatatttctcctaatatccaggaagaaagaggatgatattgctcccattatagcagacggtatacgcctccctgtaacattgtttctaatatcaagactgggagaggatgatatcacttccagtatcgcaaggggtgtacacctcccccgtgatattgttactaatatccagggggaagaggataatattactttcaatattgcaggggctgtacacccccgtgatattgttgttaatatttaggttgggagaaaatgatattagtccaaatatcgcagagagtgtacacacttccgataatattgttcttaatatccatgggggagacgatgatattacacccaatatcgcagggggtgtagtctccccttgtgatattgtccctaatattcagggaagtaaacgatgatgttagtgtgaatattccagggagtgtacaccccctttgtgatattgtcctaatatccgcaggagagaagataatattactcccaatatcgcagggggtgaacacaccccctgtgatattgtttctaatatccaagcgaggagaaaataatattactcccaatgtctcaggggatatacaccttccctatgatattgtttctaatattcaggtggaaaacgggtgatattactcctaatatccaggaagaaaggggattatgttactccccttatagcagggggtatacacctcccctgtaatattgttcctaatatcaaggctgggatatacgtggggggaaggatgatattactcccaatatcacaggggttataaaaccttctgtgatattgctcctaataaccatggcggaagaagatgatattactcctaatattgcaggaggtgtacactcccccattatgttgttcctagtatgcagaaaaggagaggatgacattattgccaatatcgcagggtgtgtacaccacccatgatattgttcctaatatttagagggacagaggatgatattactcccaatatcgcagggggtgtacacgcatcccctgtgatattgttcttgaaatcgaggggaaagagaattatatttctctaaatattgcagagggtgtacaccgccccctgtgatattgttcctaatagccgggggcggggggagataattaaattactttcaatatctcagagagtgtacatcccccttgtgacattgttcctaatatccagagcaaaagagaatgatattcctcccagtatcgcaggaagtgtacatttaacctgtaatattgtttctaatatccagggggaagagaatagtaatactcccaatatcgtaggggttgtacaccttttctgtgatattgttgcaaatatttagaagagagagagaatattactcgcaatatcacagggaatgtatacttcccctgtgatattgttctaatatctagaaaaagagaggataatattactcctaatattgcagggggtgtacacccccacttgtgatattgttcctaatataaaggaaggtcgaaaaacaaacggggagcccagggggaaggaaggcaggcgaggaagaggcagcgccggggcgccggagggagcagccgggccgcggaagcgcgagcacgagaccggtcgcggtcgcagtcgcatttttgccgttgtcgcggccgccgccgccgaggcttacccggggatgtctgagcccgcgcctcgcggcccccaagctccacgctgcgcccgctgtcccggcctctaagggccgccacgtccctgcggcgcgcgcaggcagaaagcggcttcgtgccggcggagggggcccgggcgggccgggaaaggctgccccaggccccgcgcctaccccatcaccgcggccggcgccgggccgggaggatgagcggtgtggggctctgaagcatggagggggttttgtacaagtggaccaactatctcacaggttggcagcctcgttggtttgttttagataatggaatcttatcctattatgattcacaagatgatgtttgcaaagggagcaaaggaagcataaagatggcagtttgtgaaattaaaggtgacagctttggaggggaccacccttgattggatacataaattctgttcattcagcagacaacacaagaatggaattaatcattcctggagagcagcatttctacatgaaggcagtgaacgcagctgaaagacagaggtggctggtcgctctggggagctccaaagcatgtttgactgatacaaggactaaaaacgaaaaagaaagaagtgaaaccagtgaatcgctgaaaaccaaaatgtctgaacttcgcctctactgtgacctcttaatgcagcaagttcatacgatacaggaatttgttcaccacgatgagaatcattcatctcctagtgcagagaacatcaatgaagcctcttctctgcttagtgccacgtgtaacacgttcatcacaacgcttgaggaatgtgtgaagatagccaatgccaggtttaaacctgagatgtttcaacggcaccatccggatcccttagtttctcctgtgtcaccttctcctgttcaaatgaggaagcgttctgtcagccaccctggttcttgcaccagggaggagtagccactgtataaaagaaccagtatctgcacttcaccgactctcccagcgacgccgaagaacctactcagatacagattcttgtagtgatattcctcttgaagacccagatagacctgttcactgttcaaaaaatacacttaatggagatttggcatcagcaaccattcctgaagaaagcagacttatggccaaaaaacaatctgaatcagaagatactcttccatccttctcttcctgaagaaactgtagtgtccaactttctctaagtattgctatgcaaaagctgctgtaattgaactattgttatagggagtagttttttcccttaggactctgcactttatagaatattgtaaaacagacaaacaagaaaacaaaccacatacttttgaagcgtgttttatctttatatagtttgtttgcaagagtattttcctaataacttcacagtatgaatgtgcatcttttttttctttttttaacaaatgatggtgtaacattttgacatccataaggacaaatgtagatatttttctaaaaaaccgtgaggggactgacagcttggtcagggtgtattgtagcttataaacatgaaatcttacaaggtttcagtttgacagaagtgtgatatatgtaacttgtgccatggaccaaatggtcactttaccacagctaaaaatgagttatgatagcagcttgatggtgattgcattgtattcctttaatcaaaaaggaaacgcaatattctaagtatctttagcccaaataccatgacatattgagcatctttaaataaccagactgtattgtccttcatatgtgaagttgacactactgatttgtcaataccaaattttgggttaaagtgtttaatttttatttatttattttcttgttgcctcaaaagatgattgcattctaacttttgtgacctaccaaatttaagatgtgtatacattgttctttacgttgttctagaaaagagattttaatgctgtagtgacttagctcacttacatcagagaaataaacaactttcaatggaaaaaaatatatataaaggaaggaagaggatgatattacttctcatatagaaggggttgtacaccccccttgtgatattgttcctaatattcagggagggagaggattatattactcccaatatagcagggagtgtacacccccccccccgtgataatgttcctaatattcagggaagcagaggatgatattactttcaatatcacagggggtgtgctgtccccctgttatattgttcttaatattcaggggggagaggatattattatgcccgatatcacaggagaagtacaccccacaagtgatattgttcctaatatccaggggtaaagaggatgatatcgcaggtggtgtacacccctccccgtgatattgtttctaatataaagaaggagagagcatgatattactcccaatatcgctggaggtctacaccccccttgtgatactgttcctaatatccaggaagggaaacaatgatattgctgtgaatattccagggggtgtacacccctttgtaatattgttcctcatatccagggggtagagaggatgatattactcccaatatcgcagggggtgcacggccccactgtgatattgtttttcatatccaggaggggagaggatgacattactctcaatatggcagggggcgaacaccccctgtgatattgtgctagttaggttgggagaaaatgatattactcccaatatcgcagggggtgtacaccgctcctgtgatattgttcctaatatccatgacgggagaggatattactcccaatatcgcagggggtgtacctctcccctgtgggattgttcacagtatccaaaagggaagaggatgatgttactcccaatatcacagggagtgtacaccaccattgtgatattgttcctaatagccagggaagaaaacgatgatattattgtgaatattacagggggtgtacacaccccctgtgatatggtttttaatatacaggttggaaaaggatgatattactcccaatatcacaaaaggtgtacacacccccccatgatattgttcttaatacttcggtggggagaaaatgatattagtctccatatcacaggggtgtgaactcctccggtgatattgtttttaatatcaagaggggaggagatgatattgctttcaatatcgctgggggtgtacatccctcctgtgatattgttccttatatccaggcgaggggaaaataatattactcccaatagtacacaccccatgtggtattgttcctaatactcagggggaaagaagataatattactttcaatatcacagggtttgtacacctttcctgtggtatagttttcaatatccagggggaaggtacatgatattactcccattgcagcaaggggtgtacacacctcctgtgatattgttcctaatatccagaagtggtgaggatgatattactcccagggggtgtacaccccacctatgatattgtttctaatatccaggggaaaagagtgtgatattatgcccaatatcgcagagggtgtacacttatcctgggatattgtttctagtatttggggagggaggagaggatgctattattctcaatatcgcagaaattgtacacccccgctgtgatattcttcataataatcagggaaaaagaggatgatattactaccaatattgcagggggttacacttcccctttggtagtgttcctaatatccaggaagaaagaggatgatattaatcccattttccaggaagtgtacacccaccgtgtcatgttgttcctaatatccagcagggaagaggatgatattactcccaatatcggagagggtgtacacttcccctgttatattgtttctaatacccagggggaagaaggatgacattactgccaatatcacagggtgtgtaccccaccctgctattgttcctaatattcaaaaggaaagatgaaaatattactcccaatatctcagggtgtgtacacctctcctgtgatatcgttcctaatatccacaggaagagagaatattactctcaatattgcaggggggtgtacacccccctgtgatattgttccaaatattcgggcggggagaggatgatattagtcccaatatcgcagggggtgtgcaccaacctgtgatattgttcctaatatccatgcgggggaggacgatatcactctcaatgtcgcaggaagtgtacacctctcttgttatatttttcttaatatccaggagggaaaagatgatattactgccaatatcgcagggtgtgtccaccccccttttatattgttcctaatatccaatggaaaagaggatgacattgctctccatatcccagaaggtgtacaacgcccctgtaatattgttcctaatattttgggggaagagaggatgatataacttataatatcacaggaggtgtacaccacccctatgtattgttcctaatatcctttaagggagaggatgatattactcccaatatctcaggtggtgcctattccccctgtgatattgtttttaatatccaggggaagagagtatgatattacgcccaatatcgcagggggcatacaccctctctgagatattgttcataatatatagagggagagaggatgatattacttccaatatcagaggtggggtacaccccccggttatattattcttgatatccaggaggggagaggttgatattactggatatatagcagggagtgttcacatcttctgtgatactgttcctaatatccagaaaagtagaggatgatattactcccaatatcgcagaacgtgtacacctccctgtgatattgatcctaacattcaaaggggagaggatgatattactcaaaacatcacagggcatgtacactcccctgtgatattgttcctagtatccagaagggagcaagataatattactttcaatatcgcagggggtgtacacccctctttggtatgtttcctaatatccagaaggaaagagggtgctattactttccatattgcaaggggtgtacacccccctgtggtatggttcataatatccagggagggaaagggtgctattattccccatatcgcgaggcatgtacaccctgctgcggtacggttcctaatatccagggggaaagaggatgctattacttcccatatcgcggggtgtgtacacccccgtgtggtatgttttgtaatctccgggaacgaagagggtgttattacccctcatatcgctggaaatgtacactcccctgtggtacggttcacaatatccaggggattgagggtgctattactccccatatcgcggggggagtgcacctccctgtggtatggttcgaaatatccagggtaagagagggtgctattattccccattttgcaggaggcgtacacccctctatggtatgttttgtaatatcccaggtaaggggtgctattgagagaagagagcaaaagaccccccccatattgttctgtattattttatactcagtacctgttttaagaagaaacaaggaagcgaaaccaaaggcaggcagcccggcgccaggcaccagatccaaaaccagacccgaaaccaggcctgggccttcctgaccttagcctgaaagttaaaattcaacccatgacctagcaactgatgttatccatagattccagacattgtatggaaggacattgtgaaatttcttgttctgttctgtttcactctgagtactggtgcatgcagcccttgtcacatacccactagattgctcaatcaatcatggccctttcatgtaaaaaccttagtgttgtgagcccttaaaaaggacagaaattgtgcactcaacaagcttggattttgatactctagtctgctgatgcttccagctgattaaaagccacttccttcactacctcggtgtctgtgggattttgtccgcggctcctcctgctacactgtgactccccttatagagaggggtgtacacccccctttggttcctaatatccagcgggggagtaggtgctattactccccatattgcggggagtgtacacccccttgtagtacggatcgtaaaatcaaggagggagagaaggtgtaattatccccatatcacagggagtgtacacccctttgtggtatagtttgtaatatccacgacgggagagaatgctattactccccatatcgtggagggtgtacaccgccctgtagtatggttcgtaatatccggaaggggagaggttgctattactccccatatggtgggaagtgtacacccccatgtgatatggttcataatatccaggggggtagaggatgatattacccacaatatcatagaaggtgcacacccttttgtgatattgtccataaaatccagaaggggagaggatgatattacttccaatatcacagggggtgtgtagccccatatgatattgtttgtaatatcaaggtagggagaggatgctattccttacaatagctcaaggggtgtaaccttcttgtgatattgtttgtaatatccagaaggggagaagataatttttttattttaaaagtaaactttaatgtcaaaaatgcaaacttgagaagggcagaaagatcaaacagaaggctgccacttcacaattggagggttgcacagtggccgggcagaggcgctcctcactccccagacggtgaggcagccgggcagaggtgctcctcacttccgagatgttgcaggagccgggcagaggtgctcctcacttcccagaacagggggctgccgggcagaggtgctcctcactgcccagacggtttgcaggcctggcagaggcactcctcacttcccaaacggagcagcggcaagccagaggcgctccacacttcccagatggtggggcagccgggcagaggcgatcctcacttctcagagggtagggcggcccagcagaggcgctcctcacttcccacatggtggggcggcaggctagaggcgatcctcacttcccagacggtggtgtggccatgcagaggtgctcctcacttcccagatggtgtggccgccgagctgaggcactcctcacttccctgacagtggggcggctgggcagaggcgctcctcacttcccagacacttggactccgggcagagactctcctcatttcccagatggtggggctgccgggcagaggcgctcctcacttcccagacggttcagaggccgggcagaggcgctctggggagaggataatgttactcccaatatcgcagggggtgcacactccctgtgatattgttccgaatatccagagggggaaaggatgatatagctcccaaaatcgtggggagtgtacacccccctgtgatcttgtttgtaataccaagaagaaaagagaatgctattatttccaatatagcagggggagtacaaccccctgtgatattgttcgtaatatctagggggagagaaaattatattagtcttaatatctcaggggacgttcatccccctgtaatattgttggtaatattcagaatggagaagatgatattgttcttaaaatacaggaaaaaatatgataatattacttccaatatcgaagggggtgtacactctcctgtgatattgttcccaatatccagaatgaaagaggatgctattactcccaatatcccagggagtgtacacccctttgccatattgttcataatatccaggggaagacaggataacattactcccaatatcaccgggggtgtccacccactagtgatatttattgttcatcatatccagaaaaggagaggatgatattactcccaatattgcaggtggtgtacggtccctgtgatattctttgaaatatctagaaaaggagaggatgatatcactccgagtatcacagggggtgtacacccccctgtgatattgttcgtaatatccaggggagaaaaggatgatataattgccaatatttcaggggatgtgcacctccctgtgatattgtttgtaatatccaggggtggagaggatgatattactcaaaataacgtaaacatcctgtgtgtacatcccctgtgatattgtttataatatccaggggggtagaagatgacattacccccaatatcacagagtgtacacacccctgggatactgttcataatatccaggcgggaaagaatgaactacttccaatatcgcaggatatgtacacccccctgtgatatatttcctaatatttatgtgggtaaggatattacccccaatatcacagaaggtgtacatcctctttgtgatattattcctaacatccaggaaaggagagaatgatattactcccagtatcgcagggggtgtacaccacccctgtgatattgttgctaatatccagggggagaggataatattactcccaaaatcacaggggacgtacactcctcctgagatattgttcctaatattcatggggaaaagaatgctactactccaaatacagcagagggtgtacaccatccccgtgatattgttttttatatccaaagggtgaaaggctgatattactcccaatatcgcagggggtgtacaggccccccatgatatcattcttaatatccagggaggcaaagaatgatgttactcccaatattgcaggctgtatacaccccccgtgatattgttcctaatatccagagtaagagaggatgacattgctcccaatattgcaggggttgcacgcacgccctgtgataatattactcccaatatcaacagtgggtgtacactcctcctgtgatattgtttgttatatctaagaaagaagaggatgatattactgtcaatatcacagaaggtgtacagccccttgtgatgttgtttctaatatccagcggtgagaggatggtattactcgcaatattgtagggggtgtccaacggccctgtgatattgtttctcatattcaaaaaggaaaagaataatataactccaaatatcgcagggtgtgtacacttccctgtgatattgatcctaatatccaggaagagagaggatgatattaatcccaatatcacagggggtgtacatcgcttctgtgatattcttcctaatatccagggggggaggggatgctattactcttaaaatcgcagggaacttacactcccactatgatatttttcctaatatccaggaagggagaaaatgatattactcctaatatcacatatcacaatgggtgtacatctccccgtgatattgtttctaatatcaaggatgggagaaaattatattactctcaatatcgcagggggtgtgcacacctcctgtgatattgttcctagtatccagcggaggagatgatattactttaaatattgtagaaggtgtacaacccccctttgatattgttcctaatatccagggggaaaggagatgatattactcctaatatcgcaggggctgtacaaccctatgtgatattgtttcttctaatatccaggggtggagaagataatattactcctaaaatcgaaggggacatacactccccctgtgatatttttcctaatatccagaaggaaagaggatgatattactcctaatattacaagaaatgtatacctgtcctgtgatattgttcctaatatccagaggggtaaatgattatattactcccaatatcgcaggggtgtacaccttccctgagatattgtttctaatatgcagtggaggagaggatggtattactcccaacatcacaggagatgtaaactccccttgtgatattcttcctaatgttcaggacgaaggagggtaatattactcactgtattgcagcagggggtgtagagccccctgtgatattgtttttaatattcaaggttggagaaaataatattccttccaatatcgcatggggtgtacacccttctttttatatagtttctaatatctggggggagaggatgatattactcccaatatcgcagggggattacacccccactgtgatattgtttttaatatccagggtgggagaggataatattactccaaatatcccagggctatacaccctccgtgtgatattgtttctaatatccagaggaagagaagatgatattactcccaatgtcacagggtgtgtacaggccttctttgatattgttcttaatatccatgagggagaggatgatattactcccaatatcgcaaagactgtacaccctttctgtgatattgcttccaatatccagggagggagaggatattacactcaggatcacagggggtgtacaccccaacctgtgatattgtttctaatatctagggaaaatgagggtgatattactatcaatatcacaggaggtgtacactcccttatgatattgttcctaatatccaggagaatgacaggataatattactcccaatatcgcgggtggtgtctccccccactccgtgatattgttcctaatacccagagggggagagaatcatattactcccaatatcgcaggggatgtacacctacatccggcggagtagaagataatattactcacaatatcgcaagaagtgttcaccttccctgttatattgttgctaatatccagggagtgagaagatgatattactttcaatactgagcgtgtacactacccctgtgatattgtttctcatatccagtagaggagaaaatcatgttactcccaatattgcaggggtgaacacctcctttgtgatatttttcctaatatcaggaaagggagagtatgatattacccttaatattgacaggggtgtacacccccctttgatattgttccaatatccaggggggcagaggataatattattcccaatatcgcagagggtgtacaccccccgtgatattgttcctaatatccagagaaataaaaaatagtattatttccaatatcacagggcgtacattttccctgtaattttgttcctaatatctggggggtggggtggcaggataatattactctcaatattggagagggtgtacacccccctgtgatattgttcctaatattcagggtgggagagaatgatgttactcccaatatctcaggagtcgtatacacccccttgtgatattttttctaatatccaggaggcagaggatgatattgctcccaatatcgcagggggtatacacccgagctgtgatattgtttctaatatgcaatatgggggaaggatgattttactttcaatatcgcagggaatgtacactttccttgtgattttgttcctaatatccaggggtggagaagatgctattactatattactcctcatatcgcaggcggtgtacaactccctgtgatatggttcagaatatccagagtgaaaaaggagggtgacattactcccaatatcgggggggtgtacacccctttgtgatgtggttggtaatatccaggggggcagatgagggtgatatcactccccatatcgtggaaggcgtccacttttttgtgatgtggttctttatatcccgaggggagaaggtgatattactccccatatcgcgaagggcatacacccccctgtgatatagctcataatattccggagagtggaggaagatactatgccctatatcgcgggtggcctacaaccccctatggtttggcttataatatccaggggggagagggtaatattgctccccatattgtggagacgtacagccccctgtgatatggtttgtaatatctttggggggcgagggtgatattactccccatatcgcggggagcatacacccccgtgatctggttcatagtatctcaaaggaagaagttgatgtgtacaacttaagggaaaaagttgaagtgaagtgtacacacgccctgtgacgtggttcataatatccaggcgggggagaggagagtgatatttactccccatatcgcgggtgttgtaaactcccctgtgatatagttcataatatccaggggagagaggagggtgatattgctcctcatatcgcgaagggtgtacaaccccctgtgatatggttcataatatccagaagggtagaggacgatgatattactccacatatcttgggaggtgtgatatggttcgtaatatccagcgatgagagaatgatattactccccatatcgcaaaaggtgtgatagggtttgtaatatcctgagggggagagggtgatattaatccctatattgcagaaggactacaccctcccatgacatggtttgtaatatcccagggggtagagtgtgatattactttccatatcacagggggtgtgatatgattcgtaatattcgaagggggagagggtgacactactctccatatcacggggtgtgtgatatggttcttaatatcccaggggttagaggttgatattaccccctttttggggggtgtgtacaccccctgtgatatggttcgtaatatcccgggggagacagggtgacattattccccatatcgaggggatcgtacaccccctgtggtgtggttcataatatccctagggggagatggtgatattactccccatatcagggggcgtgcactcttctgtggtataattagtaatatccagggggcagaggtcgatattcgtttccatatcatgaagggagtacacttccctgtgatatggttcctaatatccaggggggagagggtgatattattccccatattgcggggggacatacaacccctgtgatatggttcataataaccagaaaagaagagggtgatattaatccccgtattgcagagggcatacaccccccctgtgatatggtttgtaatatctaggggaggaaaaggtgatattactttccatattgctgggtgcagacacccctttatgatatggttcataatatccaagttggagagggtgatattacttcccatatcatgggaggtatacccttccctgtgatatggttcgtaatatccagaaggggagagattgatattactccccatattgtggggggcgtacaccttcctgtgatacggtttgtaatatctaggggatatagtgggtgatattactcaccatatcacgggggttgtaacatggtttgtaatatccaggggaggagagggtaatgttactccccatatctcggggcatgtacaccctcctgtgacatggttcgtaatatccaggtcgggagagggtgatattactcctcatattgccgggggtgtgttatggttcataatatcctggggaaggaggctgctatcactctccacatcttgggggatgtacactctcctgtgatatggttcataatatccagggtgggtgagggtaatattactccccatatcgcgggaagtgtacatacccctgtaatattgtttgtaatagaagagagggtgatattactccccacatcgcgggtggtgcccacccccctgtgatatggtttggaatatccagggggatgaggagggtgatattactccccatatctcggtgggagtacatccctctttgatcaagttcataatatccaaaaggaaacaggagagtgatattactccccatatcgccgggggtgtacacgggagggggagtacacccccggcgatatggtctgtaatatccagggaaggagaggagggtgatattactcaccatatcgcaggtggtctacatttacctgtgaaacagtttgtaatatccagggggggaaatgagaatgattttttttttttgagtctcactgtgtcacccaggttggagtgcagtggcacgatcttggctcactgcaacccccgcctcctggactcaagcaattctcctctcccagcctcctgaatagctgggactacaggcgcaccccacaacgtctggctaatttttgtatttttattagagacggggtttcaccatattggccaggctgatctcgaactcctgaccctgtgatccatccgcctcggcctccaaaagtgctgagattacagatgtgagccaccacgcatggcccaaggagaacgatattactccccatatcccagggggtgtatatccccctgtgatatggttcagaatatccggaaggaaagacagggatattacttcccatatcgcaaggggtgtgacatggttcgtaatatcccatgggggagagggtaatattactcttcgtattgtgaagggcatacactcccctgtgatacagttcataatattccggggagtagaggaagatattatgctccatatcgcgggtggcataagccccctgtggtttggttcataatatccagggaggagagggtaatattactccccatattgtggggacgtacaccctcctgtgatatggtttgtaatatcccagaggggagagagtgatattactccccatattgcagggacatacacccccctgtgatatggttcaaaatgtcttttttttttgaaggactggttctttatttcaaaaagacacttgtcaatattcattatcaaaacagttgcactattgatttctctttctcccaatcggccccaagtagaccacatcaaaggagagtacatattaagccaataagctgtaggatgtacacctaacagacctcctagaaaccttaccagaaaatggggacagggtagggaaagaaactttaaaagatcaacaaactgccagcccacggactgcaggggctgtcacagccagatggggtggccagggtgccacaaacccaaagaagcaaagtttcaaaataatataaaatttaaaaagttttgtacataagctattcaagatttctccagcactgactgatacaaagcacaatgagatggcacttgtagagacagcagcttcaaactcagaaaagggtaatgagatgagtttcacatggctaaatcagtggcaaaaacacaatcttctttctttctttctttctttcaaggaggcaagaaaagcaattaagtgctcacctcaacataaggggaacatgatccattctgtaagcagttgggagggggtagagatggaacaaaattttggtctcagaggtcttgccatcttaatttggtcacttctaatgaaaaaaataaaaaatagaaataacattatccaaaggtatcttaaagctgaaaacttgaacagcacattttttgttgttgttgtttggctaactcctcctggaaccacctttctggcttagctagtactttgtacagagcaatgaggcttcccatagtggagtctccctgggctctgtttggctctcagcaaggcaggcctataccttttcctctcctccatggagagaggaatatgcattaaggtgaaaaatcaccttccaaaagtgagaaagggattcgatcgctgcttcagggctgtggtattatatggaatgttttacaaaaggttgctacaaaacaacaaaagaggtaattacaaaatgtgtacatcacaacatactttttaaagacattatgcattgtgctcacattcccttaaatgttgtttccaaaggtgctcagcctctagcccagctggaatctccgggaagaggcggacagtttggtgaaaaagacacagggaaggagcgggcggcggaaggagggggcggcgaaaggagaaagcagccttccagttaaagatcagccctcaattaaaggtcagcttcgggcaggctggcctcaggcggagtctggttcagagggaggagcagcagcagggtgagactgaggcgttctacatctcattcaggtcaagcagagtctggtccagcatcctttgtgtacagaggtgctcccctttggtgcatttcagtttatcttccaagtcatcaattgtcttttccagcttggctaccgatctctcagcaaactcagcatgggtctccgcctcctttattttatcagtaagaatcttgatctcttcctcatatttgtcttctttttgagagtacttttcttcagcagcactcagacacttcaggttctggtccatcagtctaatctgctcatccatctctcggcaaagggattctgccagctcagctcgttcctctgtgcgttccaagtctccttcaatgatcaccaacttacgagccacctcttcatacttcctatctgcctcttctgcaatgtgcttagcttctctgagttggatttcctggagttccatcttttcttcatcttttaaggcccggttttcaataaccttcttacctctctcactctcatcagcagctttttccgcttcttccagcttttgcagggcagtagccaggtgctcctgagcacggtccagctcctcttcaaccagctggatcccacgttcaaggaggccacctcagcctcagcctgttcccgggcccacctttctccctcaacttctcgctggaggcgctcagctcgctcctctgcatcatctgcctgctgctgcagaacctggatcttgcgcttcaccgcctcgatggtggtgatcccagccatggtgcccacccagctactgctagagctccggttcctgcctcctccgatcggcgttgcagcctcctctcacccttacttccgcctcggttcaaaatatcttaagggaaggagttgatattactccccacatcacgggaagtttacatcccctggtgatatggtttgtaatatcccagggtggatagggtgatattactctccatatcgcgaaggagtactcccccctgtgatatggttcataatatccttggggggagagtgtgatattactccccatatcgcgagggccatatactcctttgtgacatggttcgaaatatcccggtgggggagggggtagagggtaatattactccccatacagcgaagagcatacgcccttctgtggcaaggttagtaatacttcagggaaaagagtgcaatattacttttcatattgcagggaacatacactcccctgtgacatggttcgtaatatcccgggggctgagagggtgatatttctccccatatcaccgggggcctacacctgggtgtgatatggctcataatatacagggagggagagggtgatattactccacataccgagtgaggggttacacaccctcgtgacatgttcgaaataccccaaggaggagacaatgatattactttccctgtcgcgggggctacaccctcccagtgatatggttcacaatatcccggggtggagagggtgatattactccctatatcaccggggggtgtacacttccctgggaaatggtttacagtatccccggggggagagggtactattactccccatatcacgttacatatcagggtacacccccacgtgatatggtttgtaacatcccaggaggaagaaaatgatattactccccatatcgcggtggcatacacccctccccgttaaatggttcataatatcttggggtggagagggtgatattactccccatatcacgtggggcatacaccccactatgatatggttcataatatcccggaggggagagggagatattactctccatgtcgcggggggcatatacacccctgtgatatggtttgtgatatcccgggggcggagagggagatattactctccatatcgtggggtcgtacacttttctgtgatatgattcgtaatatccagacggggagagggtgatattacttcccatattgcgggggcgtacacccctctgtgatatggttcataatatcccgaagaaaagagggtgatattactcctcatatcgcggggaacacacaccaccctgtgatatggtttgtaatattcagcgggggagagagtaatattactccctgtatctcggatggcgtacactcccctgtgatatggttcataatatccagaagaaaagagggtgatattactccccatattccagggaatgtacaccaccctttgaatatggttcgtaatatccaggaggggagagggtaatattgctcccaatatcgaaggaggtgttatacggttagtaatatccagagaaggagagggtgacattactccccacatcgtggtgggtgtgcacccacctgtgatatggttcataatattcaggttaagagaggtgatattgctttccatatcgccaagggtgtacactcccgtgaaatacagttcgtaatatccaaaaggggagagggtgatattactcccatatcgtggggggtgtacacccctctgtgatatggttcataatatccagggtggaataaggtggtattactccctgtatctcggggcatgtacatcgcctgtgatatgattcataatatccagaagaagagagggtgatattaatctccatattgctgggggtgtacaaccccctgttgtatggtttgttacactgagttggggagagggttacattactctcaatatcgagtggggcatacacacttatgtgatatggttcataatatcccagggaggagagggtgatattactccccatatcgcgggaggcatacaccccaatgtgatatggtttgtaatatctacatttttttttttgagacgaagtctcgctcttgtcccccaggctggagtatgatggccggatctcggctcactgcaacctcagcctcccgggttcaagcgattctcctgccttggtcccccaagaagttgggattacaggcgcacaccaccacgcccggctactttttgtatttttagtagagaaggggtttcaccatgttggccaggctggtctagaactcctgacctcagatgatccacctgcctcggcctcccaaagtgctgggattacaggcgtgagccactgcacctggcctggtttgtaatatctatgaagggggaaggtgatattactttccatatcacgggaggcgtacaccacgatgtgatatggtttgtaatatccagggggtatactgggtgatattactccccatatcgcggggagtgtatacccttttgtgatatggttcctaatattaagctgaggagaaggtaatattactccccatatcgcaggggtttttatatggttcataatattcaggaagagagagggtgacattactctccatatcacggggtgtgtactcccccatgtgatatggtttgtaatatccagggaaggagaggttaatattactccccatatcgcagggggtgtacacctctctgtggtttgtaatatccaaagggaagaggatgatattatcttcaatatcttggggggatacagtccccagtgatattgttcataatatccagagggggaggggatgatattactcccaatattgcaggtggtgtacaaccccctgtgatattctttataatatagagggggatgatgatattactcccaatatagtaaacaacctgtgtgtacaccccctgtgatattgtttataatatccaagggtggaaaggatgatattactcctcatatcgcagggggtgtatacccctctgtgacattgttcctaatattcaggggaggagaagatgatactactcctcatatcacaggggatgtacacccccctgtgatacttttggtaatatccaggggaggagaaaattatattattccccatgtcacagagggtgtacaccccgctgtgatagtgttcataatatccaggtgaaaagaggatgatattactccgaatatctcaggaagtgtacacccttctgtgatattgttcataatatccaaaggtggagaggaggatactactccccatatcgcagtgggtgtacacccccctgtgatatggttcataatatccaatgtaggagaggatgatattactttccatatcgcggagagtgtacatccccctgttatattgtttgtaatattcagggagaaagaggatactactactccccatatcacacggggtgtatattcccctgtgatatggttcctgatatccaagagatattataatcctctcttggattatgctacctctcatatcgcatggggtgtacacacactttgtgatatcgtttgtcatatccaaggagggagaggattatattaatcccaagatcacggggggtgtacaccctcctgtgatattgtttgtaatattaaggggggagaggataatattactcccaatataattaacaccctgtgtgtactcctccttgtaatattgttcataatatccaatgggggagacgatgatattactttcaatatcgcagaggatgtacatccctttgtaacaatgtttgtaatataaaaggcaagagaggatgatactacttccaaaattgcaggacatgtacaccccccggtgatattgttcctaatatccagtggggaagaggatgatagtagtcccaatatcgcaaagggtgtacacaccccctgggatattgttcctaatataaaaggaggagaggatgctattattcccaatatcacagaaggtgtaaaatcccctgtgatattgttcgtaatattcaggaggggagaggattatattactcccaatatcacagggtgtgtacacagggaggggcaagggccagaagcgggcgggaatccccatgtttgggcggacccagtttctaatggccagcatttgccaatcaaagcttaccagagaactctaaaagccagggctttcctgctagacaagactcatttctggaactgctttaaaaagaaacaaaacttcccaaggaccccttttcctctctgtctgcctaaaataatgttttaaaaactcctaaagcagctgaattcagcccccttcctgggggaatgtatagacggaactcccacctttcccggcatcccaaggccagagtatgtgaaactcctgggtctctatgtgtgtctgagcggctgctctgccaacactccacacagccctgtgtcctggacccaaggcccttatgacctgagctcaagaggggatctcctgatccatgggttgcaaagatccatgggagaagcatggtttctggggcggggtcacacgctcagtcactgtttccctcggatgccggagatggttcctttggctctctgccaatacagggtgaatcatcatccatccctcttttctttgttctcccgggtcaagttgtttgcctagtcagtcccaatgtgagaacctgaatatttcagttgacgcgctgacttcaaaatccccgggcttcgggaggcggagcttgcagtgagccgagatcccgccactgcactccagcctgggcgacagagcgagactccgtctcaaaaaaaaaaaaaaaaaaaaaaaaaaaaaagtccccgggcttttcttttcactcagtggaaggcagctgcttctaattggccatcttggcccgcccccaccacgtgaccttctgtaaaatgcctccactctccaggaacgctctcattatataactttgcctgaaaccaacagcacgctcattgcacatatcatgggctcatttatttcacttataaagaacctggccaaggaagagatagtgcctaaagtggccagtattctgaccgatatgttagaaaaatggtgtgccgaccaattcatgacatgtgtcccaaaactagcaacggaaattgtattcgccgtgttgaggtctctaatccagatgatgctcatctatgtactggaaaaggcagagtcctttcctgacaagctgctgaaactcttcagaaacatctcatatttcctgaagaagatgatgtctggacaagcagcacaggtcgttcagatttaactttctattcatatatccagcacgatattcgcacaattgtcacgaaaccttaccagttgatgagtcctgcacatttcctttaatttcaggaggaagagggtaatccggatgagttttctgacctactctgctgctgtgattaaacaaccaccaggaaattttgacgacactgttctcctgagctcctccctttcctccgggaacaaaacaattgaatttacaaaaataaagtgttatttgactggagtgaggtctcatgtctgcttatgcggtggctcgctgctcagaacagggtgagtctctgggttgtgtgctgaggaggggaggctctcaatctggagaaaacccactgcaggggacacctccatggggtctgagggactgaggatgaggagccggactgggtctagggaaggaggaggtttcagagggtgaaattctggcactaaagcctgggggtgtttgggaacttcctccttccgaagaagtttcagggagggataaagacaaaccctgggctccttgaggggcccttactaatttgagaggactctatcgggaaggagagtgacaatggcctccttgaggactgaggcccctgaataaatgaggcccagatacagtccatgggggatgagaccttcaagggtcacattttggttgggacagaggaaaagtgcagctctgcagccgcagaggaaaacccggcagtgtgaaagcgaccttggaggggccctgtgcgctctgaatgcgtctgagcccccatcccctgtccccgcctctctttctggattcttccagctcggctgtctccgccatcttctgagcgctccaccctgacttattcaagtttcccttctgccttccaagtactccaaaatctttcagatctgtgtccctacccctgtttttagcatgtgttggggctccaggtccctgaaggtttctggcctgaaatccacctccccagcggagtggactgcgttctagagactccacactccgcgaggttcccaggcccctgagggacaaccgagtggcctgcgcacttcagggctccacactcggcaaggtctttcaagcccttggggtccccttcttagttttttccacctttctgggctgcagtcactccataaatgctgggatctgatccccacccccactctcgtttcctcaattctgcgggctacacgctctggcaaggtcctccgggccctggatcccctccctctccctatgcccacgctcctagtcagcccttctggggtccactattttcaggaactaaccgttctcatggagccttgctaaccggaaagctgtgtggaagaaaggctttgaggatagaggtggagatttggctcttccatagtgccactcacccaccccaccatgctgccactgccagacccggacccctgtttcagaacaagtgaccagattcgctcctggacagccctggacactggccttttctctgaaaactactcaccctttctctagtccccacttcatgccagcctcataccctcttccttcccccacgctggcttccgggatcctcctctgctcagacaacctcttctgtgtcccacccccgtttttagaatgctttggggcaccaggttgggggaaggtttctggcctgatatccatctctttccaaactcccttcttcccttgaaaggcttcttgccttcagccccacttctggctccgaggtttcaggacaccctcctcttcatcctcattcttttgaccaccagctttttaggaattcgaacgtccctctcatcttcgtgaatcctgtccaggcatttgttgaccccttcatctgatacccctgacctcacattgccaaaagtctacccctacccagtacactggaattagacaaaatcccaggagttttacctcaactctgagtgtgcccacaggagctctccctgaagccacgtccttttaagcagggtctagggttcctcccttgtcttaatgaactctttgtcacacggaggacgttatggagcccttatgatctttcactgcctttctgcccagcgttttgtctttccatggacatttataatattttccatggacattttgttctctcaatgtccacccctaatttccaacatcccaaagattctcatgtgtttcctgaaagccatttacaggaatggctgtgcccagacccccttccccaggatcctccttcacacctggtaggtgcctctcctagagagatttgcactcagttgtcgtgcagtcacatggcccagatggttgttaatcacccccttcctggcaacagctagcagccagggaatcactggcacagaaacctcagggtgaccaagatgaggccacctctgtgctgaaggctgtgctccagagcctgcttgggatcaggcttaagcaggtcttcagccagacctgatgttacctggtttccttgagctgccctgcctgagctatcgggagcactccctcaatgcacatcttgattccctatctcatgctctgcttctagaaaccatgagctatcaattgctactggcaatggtcctgggaagtcaaccctaagtatggattctggggttggatgactccccacaggacttcagtgagcaacaatcactgctggcagttggaggacagagtcgctagggcatgtgaccactgtgaaaccaccgatgtttcacctggggtaattttggatgaactacggtagaagcactgaaggtacattgcttttggtttggaagattgtaggtaaataatagcgatatgaatgtggaattggatggctgcaaacgagtgccattgatgcattgaaagaggaaaagtcaggctgtcacctgtcactcagcaatttaaagtgtgagagttgggactagatgtggtggctcacatctataatccagagattcgggggaagcttgaagaggtaggatcttttgagtccaggagttccagaccagcctggacaccagagcaagacctcatctctacaacaaaattttcttaaaaattagatgggcttggtggcacgcacctgtacttgtagatctagctaatggggagcatgagataaaaaaatcacctgagtcagggacttaggggttacaatgaggtatgattgtgccagtgcacacactcccacctggccaacagagtgagattctgcttccaaaaaaataagaaataaatcaggtttgagagttggaaagcatcatcttctcctagagccaaaggacatgtacaactgagacccaggaacaaagcttcatcacaaagagaccatcatcagtggagccgggagatgcattccccctcaccctgccttgaggaggcagtggagtcatctgtctgggatcctttctgacccagccctatttgtttgtctctttggcttctttggatttgtatattttagctgttataacactgtaaaacaaacagagtgatttttttgagttgtgtgaatgatgctagctccatagtcaccctgagagtgatgggaacttttgaatttgtggcaagttggagggtagtgtaagtgacctgagattgccaaattggggctagcactggatgtgaggttaggctagtggaaaaatatgcccagaaccagaggagtgtgggctcactgcaggtggttaggctcagatccaaattgtacagatggatagctttggggtaaagaataacatagttgagaagtgcatgtgttagtctgttcatgcactgctataaagaattacctgagactgggtaattatttataaaactcaggtttaattgggtcatggttccacaggctgtacaaaaagtatgatgctggccatcagctcaacttctggggaggccccagaatagttagagtcatggcaaaaagtacaagggaagcaggctcatcttccacggccagagctggagcaagtggtaggagaggtgatacacactttcaaacaagtaggtcttttgagaactccatcaccggacagcacctatgggatggtgctaaattattcatgaaatatccgcctccataatccactcaactgtcaccagcgcagccagccccacctccaacagtggggattacaattccatatgaggtgtgggtggggacacagctccaacctcaatcagtgggcatcctggattgggtctactatagaaggagaaccaggagctgactatgatcttgaaccctacccatgatggccgggcggggtgactcatgcctgtaaccccagcactttgggaggctgaggtgggtggatcgcctgaagtcaggagttagagaccagcctggccaacatggtgaaaacctgtctctactaaaaatacaaaaaattagaccggcgttgtgctggatgcctgtaatcacaccactacgctccagcatgggaaaaaataccaaaacttcgtctcaaaaaaaaaaaaaaaaaaaaaaaaaaaaagactgcccatgaccactgcaccagtgagagggacaccagcatcactgagatgcaagggctggacattcttcataggtcagagctcaaagcaggggacactgatacagagatgggctccatccatagcaccaaagtggtgagaggatgtgggaatggcagaggccagcactttgccatcaatgcaagggggtataaggaggtgacaccagtgccagagtacatcacggggggactgccctacaatatctaggacttacctcttagagcgtgtttcattagcgacaacagatataaatggcagacaggtgtgtccctgcattaacaggaaatagaaatcatcaagaggaacagaaggcagatgtcagcagccccttagaaagtcatcatccttcatacagttaaaatctgagacagttctcacacgagaaggcctaactcaaaaagaggctgggttctcatgaggcaggtttatgcaaaaccaaggaaggtgtacaagtttggaattctccagtttcccttggaaaagacctacagtcatttgcttaggtaactgagcactgaacaaaggtgagtattgttgtcttttagaagctcttggccaagaaggccttgttggcataaaacccatggtttggaaacatcaccatgacccctgttagagtaatggcctaagggtgggggtcaggaaattgatgtattccttgccaacttctgcctctaagtgagtgaactctgtttgtgaacctctctcctctgtggttatgttcctaggctctcatgtataatcaggagtcatagacttagaaacaggaaaaatacttacagtgtttttgtggcctgtgagctatgacttataattttaggaaaaaaacaattgcaaatggaaagcctaagtctatcaatgctcatccaagacaacataatcaataaaaaccaatatcaaatctcaaggcaaattatttcctgtatatagatggcagagatgagcaccaccatcaaaaactcaaggaccagtgctgtgggtccagtcatctgtttcatggaattcaccagtctggtatcttcaaaatccagaaggatgatggcagatggcaggaaagtaatgcaaacgtcatcaggtgtgaccccactgtagcagctgtgatggatgttttctctcaccatagcaataaataacacaacctcggtcacactgtatgcattgttggtctgcaaaatccatgttttgcaaaactcttcaggaaggtggatctgtaatattggcattgacatgagaacaacagcagtatttattcacaatctcaagctctctgtcttcccgtctctctcattagccatccaagtagtcctgaggaaccaagcccatcagaacattctgcaacataatacacagctccattctccattcaaattttgttgttgttgttgttgttgatgagacaacatcttactccatcagccaggctgacgtacagtggggctatctgggctgactgtagtcttgagcttccaggctcaaggcatcctctcacctcagcctcctaagtggcttgaactacagacacacagcgacatgctgggctagtttttgtatattttgtagagacgtgctctcaccatgttattcaggctggactcaaactcctgagcgtaagtgatccaagcaccttggcctcaaagtgctgagattacaagcctgagccactgcacccagcccaatctccattctactgataacaatgtcattaccaggtctgatggacaggaaatggtaaggtttctgaaaacctaaggatcacacagcgagttccaaaggctgaaagtgcatacctgtcgacactgataccaatgacatccaatggtgagaatgacattccttgtagtcctagctctgctcataacaaatctatactgaagtgtaagagtttgatggtcatggggattttccatgtctctgcctttcagcgatgtgccatatctgtgaagtgttcagaaatgcaacagcctgaggcatgctgggcatatcctctaataaaaaggaaaatgccattttatggtcctgtatttctacaagttggaacacatgggcctgtgatccagatgggggaaatgggaatattcccactcattcaccttcatccacgaagcccatttgaaagctttgggcttcccatccttgtagattttagtgttgtgggctgggtgcagtggctttcacctgtactgccaacactttgggaggcctagacaggtgaatccactgaggccaaaagttcgagaccagcctggccaagatggtgaaaccccgtccctactaaaaatacaaaaattagcaaggtattggggccagcacctgtaatcccagctgctcgggaggctgaggctggagaatcgcttgaacccaaaaggcagagactgcagtgacccgatcctgcctttgcactccacctgggcaagcagaacaaaacttctgtcttgaaaaaaaaaacaaaaaacgaacaaaaaagatgttagagttctgggtttagaggtctataccccagaaagagaatggtttcaacaagggacaaagaagttgctttaaacgttgacttgccatttcttttcagtgtgtttgttctcttgcgtcaagagaccaccagaaaagtggtgcaattactctcctgtcaagaatcattgactatcatctgcaagagggtcagatcctggtatataattagggcagaaatacttagtctgagaagggtatgacatccagaggccctattaatgatgtccttttctccatgcctgactctgaccccatgtgctggactgcccctgtgtggatggcctcatggcctgctcggactctgaggtcccaccccaagtggcacctccatggagggctctactcttgtatgggctctgacactcacactgagacactctcccatggacacctcttcacccacttggggtctgaaactgggctactccatccctccctaacctggaacagagagctttcactgctattacacaagtcatagaggctaactcctcatttttccaagctaattattgaaacattagtcctgggttgataagacaagataagttaacttttcataaatttgcttatcaagttttgaataaattcaaataaattcaccttccccacacaccttagttgtcgacatcacacgcgcacccatactcacagggtgagcacgaaggcttcactgtcagtggagaaagtggcaaaacccttctgtgcctcatcctggtctagacctggccctcatcctttcccactcttcccctcactcccttggattcatccacactggcctcctgcctgctgctccacctccctgcgaagctcacccctgcctcagggcctttgcacgtgcagtggcttcaagccatatcctcttcacccagatctcccagatctcctgaatgatcttcttttatcattcaggtctcagcttgcatgtaatcttctcagtgaggattacccaaaccacatagttcattcattcattcaaatattcattcaatggcatattgacaaagcagctacttcatgccaggccttgggccaggtgttatggatatggcaacaaacaaaacaagagttttctgctctcaaatttttacccacttaaaggagatatcatacatcatctgtaaataaatacatcatctgtaaataatgatgtaaataaatacatcatctgtaaatctgtaaataatgatgtaaataaatacatcatctgtaaataaataaagtataataaaagaaaatagtaggtttttttggttggaggtgaccgtgaagtttgcaaataccatcttacaacacattattttattttatttcatttcatttttaattttattattattatactttaagttttagggtacatgtgcacaacgtgcagatttgttacatatgtatacatgtgtgaagttggtgtgctgcacccattaactcgtcatttagcattaggtatatctcctaatgctatccttcccccctcccccaccccacaacagtccccggtgtgtgatgttccccttcctgtgtccatgtgttctcattgttcagttcccccctatgagtgagaacatgcggtatttggttttttgtccttgtgatagtttgctgagaatgatggtttccagcttcatccatgtccctacaaaggacacgaactcatcattttttatggctgcatagtattccatggtgtatatgtgccacattttcttcatccagtctatcattgttggatatttgggttggttccaagtctttgctattgtgaagagtgccgcaataaacatacgtgtgcgtgtgtctttatagcagcatgatttataatcctttgggtatatacccagtaatgggatggctgggtcaaatggtatttctagctctagatcactgaggaatcgccacactgacttccacagtggttgaactagtttacagtcccaccaacagtgtaaaagtgttcctatttctccacatcctctccagcacctgttgtttcctgactttttaatgatcgccattctaactggtgtgagatggtatctcactgtggctttgatttgcatttctctgatggccagtgatgatgagcatttcttcatgtgttttttggctgcataaatgtcttcttttgagaaatgtctgttcatatccttcacccactttttgatggggttgtttgtttttttcttgtaaatttgtttgagttcattgtagattctggatattagccctttgtcagatgagtaggttgtgaaaattttctcccattctgcaggttacctgttcactctgatggtagtttcttttgctgtgcagaagctctttagtttaattagatcccatttgtcaattttggcttttgttgccattgcttttggtgttttagacatgaagtccttgcccgtgcctatgacctgaatggaaatgcctgggttttcttctagggtttttatggtttgaggtctaacatgtaagtctttaatccatcttgaattaatttttgtataaggtgtaaggaagggatccagtttcacctttctacatatggctagcctgttttcccagaaccatttattaaatagggaatcctttccccacttcttgtttttgtcaggtgtgtcaaagatcagatagttgtagatatgtgacattatttctgaggactctgttctgttgcattggtctatatctctgttttggtaccagtaccatgctgttttggttactgtagccttgtagtatagtttgaagtcaggtagcatgatgcctccagctttgctcttttggcttaggattgactttgcaatgcggggtcttttttggttccatgtgaactttaaagtagttttttccaattctgtgaagaaagtcattggtagcttgatggggatggcattgaatctataaattaccttgggcagtatggccattttcacgatattgattcttcctacccatgagcatggaatgttcttccatttgtttgtatcctcttttatttcattgagcagtggttttagttctccttgaagaggtccttcacatcccttgtaagttgggttcctaggtattttattccctttgaagcaattgtgaatgggagttcactcatgatttggctctctgtttgtctgttattggtgtataagaatgcttgtgatttttgtacattgattttgtatcctgagactttgctgaagttgcttatcagcttaaggagattttgggctgagacaatgggttttctagatatacaatcatgtcgtctgcaaacagggacaatttgacttcctcttttcctaattgaataccctttatttccttctcctgcctaattgccctggccagaacttccaacactatgttgaataggagtggtgagagagggcatccctgtcttgtgccagttttcaaagggaatgcttccagtttttgcccattcagtatgatattggctgtgggtttgtcatagatagctcttattattttgagatatgtcccatcaatacctaattattgagagttttcagcatgaagggttgttgaattttgtcaaaggccttttctgcatctattgagataatcatgtggtttttgtctttgggtctgtttatatgctggattacatttattgatttgcatatattgaaccagccttgcatcccagggatgaagcccacttgatcatggtggataagctttttgatgtgctgctggattcggtttgccagtattttactgaggacttttgcatcaatgttcatcaaggatattggtctaaaattctcttttttggttgtgtctctgcctggctttggtatcaggatgatgctggcctcataaaatgagttagggaggattccctctttttctattgattggaatagtttcaggaggaatggtaccagttcctccttgtacctctggtagaattgggctgtgaatccatctggtcctggactgtttttggttggtaagctattgattattgccacaatttcagatcctgttattgctctattcagagattcaacttcttcctggtttagtcttgggaaggtgtatgtgtccaggaatttatccatttcttctagattttctagtttatttgcgtagaggtgtttgtagtattctctgatggtagtttgtatttctgtgggatcagtggtgatatcacctttatcattttttattgcatctatttgattcttctctctttttttctttattagtcttgctaccggtctatcaattttgttgatccttttaaaaaaccagctcctggattcattaattttttgaagggttttttgtgtctctatttccttcagttctgctctgattttagttatttcttgccttctgctagcttttgaatgtgtttgctcttgcttttctagttcttttaattgtgatgttagggtgtcaattttggatctttcctgctttctcttgtgggcatttagtgttataaatttccctctacacactgctttgaatgtgtcccagagattgtggtatgttgtgtcttttttctcgttggtttcaaagaacatctttatttctgccttcattttgttatgtacccagtagtcattcaggagcaggttgttcagtttccatgtagttgagcggttttgagtgagtttcttaatcctgagttctagtttgattgcactgtggtctgagagacagtttgttataatttctgttcttttacatttgctgaggagagctttacttccaagtatgtggtcaattttggaataggtgtggtgtgatgctgaaaaaaatgtatattctgttgatttggggtggagagttctgtagatgtctattaggtccgcttggtgcagagctgagttcaaatcctgggtatccttgttaactttctgtctcattgatctgtctaatgttgacagtggggtgttaaagtctcccattattattgtgtgggagtctaagtctctttgtaggtcactcaggacttgctttatgaatctgggtgctcctgtattgggtgcatatatatttaggatagttagctcttcttgttgaattgatccctttaccattatgtaatggccttttttgtctcttacgatatttgttggtttaaagcctgttttatcagagactaggattgcaacacctgcctttttttgttttccattttcttggtagatcttcctccatccctttattttgagcttatgtgtgtctctgcacgtgagatgggtttcctgaatacagcacactgatgggtcttgactctttatccaatttgccagtctgtgtcttttaattggagcatttagcccatttacatttaaggttaatattgttatgtgtgaatttgatcctgtcgttatgatgttagctggttattttgctcattggttgatgcggtttcttcctagccttgatggtctttacaatttggcatgtttttgcagtggctggtactgactgttcctttccatgtttagcgcttccttcaggagctcttttagggcaggtctggtggtgacaaaatccctcagcatttgcttgtctgtaaaggattttatttctccttcacttatgaagcttagtttggctggatatgaaattctgggttgaaaattcttttctttaagaatgttgaatattggcccccactgtcttctggcttctagagtttctgccaagagatcagccgttagtctgatgggcttccctttgtgggtaacccgacctttctctctggctgcccttaacattttttccttcatttcaactttggtgaatctgacaattatgtgtcttggagttgctcttcttgaggagtatctttgtggcattctctgtatttcctgaatttgaatgttggcctgccttgctaggttgcagaagttctcctgggtaatatcctgaagagtgttttccagcttggttccattctccccatcactttcaggtacactaatcaaacgtagatttaatcttttcacatagttccatatttcttggaggctttgtttgtttctttttactctctttcctctaaacttctcttctcacttcatttcattaatttgatcttcattcacttatatactttcttccacttcatcaaatcggctactgaaggtattgcatgcatcatgtagttctcatgccatggttttcagctctatcaggtcatttaaggtcttctgtacattgttttctctacttagccattcgtctaatcttttttcaaggtttttagcttccttgtgatgggtttgaacatcccctttagctcagagatgtttgttattactgaccttctgaagcctgcttctgtcaacttgtcaaagtcattctccatccagctttgttccattgctggtgaggagctgcgatcctttggaggagaagaggtgctctggtttatagaattttcagcttttctgctctggtttctccccatctttgtggttttatctacctttggtctttgataatggtgacctagagatggggttttggtgtggatgtcctttttgttgatgttgatgctgttcctttctgtttgttagttttccttcgaacagtcaggttcctcagctgcaggtctgttggagtttgccggaggtccactccagaccctgtttgcctgggtatcaccagcggaggctgcagaatagcaaatattgcacaacagcaaatattgctgcctgatccttcctctggaagcttcgtctcaaaggggtgcctggctgtatgaggtgtcagttggcccctactgggaggtgtctcccagttaggctagatgggggttagggacccacttgagaaggcagcctgtccattcacagagctcaaacactatgctaggagagccactgctctcttcagtgctgtcagatggggatgtttaagtctgcagaaatttctgctgccttttattcagctatgccctgcccctacagatggagtctacagaggcaggcaggcctcattgagctgcggtgggctcctcccagttcgagcttccagaccactttgtttacctactgaagcctcagaaatggtgaacacccctcccccacccagtctgccgccttgcagttccatctcagactgctgtgctagcagtgagcgaggctccatgggcgtgggacccactgagccaggcacaggatataatctcctggtgtgccatttgctaagaccattggaaaagcacagtattaaggtgggagtgtcccaattttcccagtacagtctgtcacgggttccctcatctaggaaaggtaaatcccctaaccccttgtgcttcccggtgacgcaatgccccaccctgcttcagctagccctccatgggctgcatccactgtccaaccagcccaatgagatgaacaaggtacctcagttggaaatgcagaaatcacccatcttctgtgtggatcaggctgggagctgcagaccggagttgctcctattcggccatcttggaatggcaatctatgtttgctttttacatttgaaaaaactggtgtcacgtacctaggtattaatcattgtggtatcctcttgccgatttacctctttatcattaactagtgaccctccttgtcttttgttgttacagtctgtgattttagtctattttatctaatatgagaatagctactctggcacttttttggtttccagcttcatgaaatatccttttccatttccctgttttcatttccctttcggtgtctctatagatgaagttgatttctttaaggcaccataagttgggtcttatttctttatccatttgaccatttagagaatttagaacactgtcagtgttattattcataagtaaaaacttaagagtgggtgtagtggtgtacatctgtatttcctgcactttgagagactgaggcgagctgatctcctggggtcaggagtttgagaccggcctggtcaacatgatgaaaccctgtctctactaaaaatacaaaaattagccaagcatgctggcatgtgcctgtaatccaatttacttgggaggctgaggcaggagaagcttgaacctgggagacaaatgttgcagtgagctgagatcacacagagaagtcatctccactctcctcatcagaacctcttgttcacagcatttgtgagcacaaatcaatgatggttattctttcctactaattagggatattttattacacagcaatagcctccagcaaagggaaccatcatacatgattcctacaagttgacagggctggaattatcactgaaaaactaaggtggctatacttgattcccaatgtccaatttttcatgaatagagaaatttatcctttttccccccagccagaaaccaagttttgctcttacgcccaggctggaatcaagtggcacaatctcagctcactgcaacctctgccccccagcttcaagaaattcaccttttgaacaaggagatattaaggatacactatgtgtatgctaccggtggttgcaggagactcagaaaagagagaaacagtcactggcctcgtgcaactgatattctcgggaggagagaaaggcaatcaagaaagaaacatgctgtatttcagacagctgtaagtcctccacaagaaaagaaagcaggtgaggaacataggaaatgtgtcaaccataaggttcccgctaattctataagttggtcagggatatcctccaagaataagcagcatctgagcaatcacctgaagggaggaaggaaggaagactgtgagtggtggcttacacctgtaatcccagcactttgggaggccaaggagggcagattgcctgagctcaggagttcacgaccactcagagcaacctgttgatacccaatctctactaaaaacacacaaaaaaattacccgggtgtggtggcacgcacctgtagtcccagcttccatgcccagctgatttctctctctccatatatatatatatatacacatatattgtttttgcagagatagggtctcactgtgtcacccagtcatcaagcaattctcttatactgttttggaaaagcatgggaattacaggtgtgaaataccctgctggtcctgaaaaatgtgatatttgggattctctgcctggcttgttttacccaaaataatgacctccagttccttccaggttgctgcaaaagacatgattttcactgttttataactgaatagtattcctgtatgtatacataccacattttctttatttattcttctgttgattgacatgtagggtgattccatgtctttgctactgtaaataatgctgcagcaaatatttgtgtgcattttgatctattcctttgagtaggtacccagtactgcaactgcaggactgagtagttgttatattttttgttctttcagaaatctccatagtgtttgccataaaatctgcactaatttacattcccaacaacaatgcataagatttccccttttctccacattctcactaacatttgttatgtttttgtctttttcataatacccattctgactggagtaagatatctcattgtggtggttgttgatatttttgagacggggtctcactctgttgccagactggagtgcagtggtgtgatcgtggcttgctgcaacctccacctcccgggttcaagcaattctcctgcctcagcctcccgagtagctgggactacaggcgcgtgccaacaggcctggctcattttttgtatttttagtaaagacagggtttcaccatgttggccaggatgatcacagtctcttgagctcatcatacacctgcctcagcctcccaaagtgttggaattacagtcatgaggcagcgcacccaacctcaatgtggttttaatgaccatttctctgacgattcatggtgtggagaatttctttgaaataccttttggccatttatatgtgctcttttaaaaactgactcctgtccaggtgcggttgagcatgcctgtaaccccagaacttcgggaggctgaggccaatggatcacttgaggcaaagaggcagaaatcagcctggccaacaaggcaaaaccccatctttactaaaaatacaaaaaatcagccacgggctgtgactcgtgcctgtggtgcaagttactcaggaggttaaggcacaggaattgcttgaacccggtaggcacaggtcacagtgagccaagatcatggcactgcactacagcatgggtaatagagaaagacctgtctcataaaaacaaatgaataaataaataagataaaaaataaaaaagtctctttatgtcctttgccgactttttaatgggattctttggagttttctgttgtagttgagatctttgtttactctcggtattagtcttttgtcaaaggaaaagtttacaaataatttcttccgttctgcagtttgtctgctcactctgttgagaggattatttctttggctgtgcagcagctttttgtttcagtaaagcttttgaatttatataattaaaattttcagtttggtttaaatttgcactggtcgatttttggttttgttgcctgtacttttgaagtcatactcttgaactctttactagacaataaccagaagagttttctctagttttcttctcacatttttattatttcagtacatatatttaagtctataattcatcttcaattgatttttgtagaaatagtgagaaataggagtccaggtttattcttctgcaaatgacaattcaattgttccagcaccaattattgaaaagggtgtgctttcctcaacgtatattcttatcagctttgtcaaagatcagttggctataaatgtgtggctttctttctgggctctctagtctgttacatcaatctgtgtgtctatctgtatactactaccatgctgtattggtgatgatggctttgtaatataatttgaagtcaagaaatgtgatgctcccagctttgtttatttgcttcagaaaggctgagtcaacagctgcagagatgaagctgcccctcctcgcagggctccttcccggaaaaagatcatggctcccactgaccatataaccatggctggaactcctgaaattcccaaagggaggccctacccagtgaggggggatgaatgaaggtcctacttaaggaatctgtctggccacaatcaggcacagcagctgtgctgccttgtgggggaccagaccacctggattccctggagcctgcaggctagaatgtctgagtccatggaaacacagaaatggaggccgccctcacctccccagaaaactgtagtctcaggcagtctccagccgattgccactggttggctgctattccaagccagtgggtcttaacttgagaggtgctgtggaagtggggcccacggaatgaggctgcttggctccctggattcagccccttttctaagggaatgtacagatggaactcccgccttgcccagctttccaagtatataaaactcctgagtctctgtgagtgtctgagcgagtgctctggcaacattcgacacggctctgtgtatctgacccaagacccttatggcatgagctaatgggaggatcttctgatccatgcgtggcaaagatgcatgggagaaacatggtttgtgggtaggggttgtgcattcactactgcttctcttggctgtaggtgaaggtttctttggctctgtgctgatactgggtgcaccatcacccaccccctttgtttcttctcctgggtcaagtcatttgcctaatcagtcccaatgtaggaacctggatacttcagttcaaggtgctgaattcaccgtgcttttcattcaggggaagacagctgcttctcattgggcatcttggcctgcccacttcacgtcactttttgtaaaatccacaccactccaggaatatccattacttaacttcgcctgaaataaacagaaggctcattacacttatcatgggctcacttacttcgcctataatgaaggtgccatggaaatgctagtggatgacgtggtccattttcttagggatgagatagaaaaatggtgtatggctttttaatttaattaaaatttttagtttggtttaaatttacattggtctctttttggttttgttgcctgtacttttgaagtcttactcgtgaactctttactggacaatgaccagaagagttttccctaagtttcttctgatattttgaccatttcagtacatacatttcagtctataattcactttaaattgatttttgtaaacatggtaagaaataggagttcagatttattcttccgcatatgataatgcaactgtcccagtaccaattattgaaaagggtgtgctttccctagtgtatattcttgtcagctttgtcaaagatcagttgcctatgaatgtgtggctttcattttggattctctcgtctgttacatcaatctgtgtgtccacatttatacctgtaccatgctgtattggtgactatggctgtgtaatatattttagagttaggaaatgtgatgctcccagctttgttcatttgcttcagctgaaaaggttgagtccacaattacaaagatggcagccgcccatccccggaggacctccaacccagaaagagatcaggcttcccaccaaccctataaccctggctggagttcctgaaattccaacagggaggaccttcccagtgaggagggatgaatcaaggtcaaatttaaagaaacagtctggccactatcaggcacagcagcagtgctgccttgtgggggacccctcctgctccagaccagctgccctccctggagcccgaaggctagattgtctgagtctacggaaacagagacggtggccgccccaaccacccagaactcggtagtctcaggcacttggcttgctatcttgccactgcttggctggtattccaagcccgtgggacttgagaagtgctgtgatgatggggaccacaggatgaggctgtctggctccctgtgatatggctgtgatgagtggaggaacaccagggctcatgtctcacacagaattggagaaaatgacacaaacacatgtacagtggttttatggcgtgcagtttaataggcaagaacgaaggaagagctccccatactgagacagagggaggggggctccaaagccaaaagaggaaacccggagtgctgtggataccaatgagttatatgaagaaactggagggggcggtgtctgatttgcatagggttcaggcgattggttcgaccaggcatgtcatttatgtggcccacggaaaaactggccctcccacctagcctttgaatatgcacgtgccggacaccctgatttcctacactcatggggatatatgggggtggccatatcgccaggcacaggtggggacaagggccagaagagggcgggaatcgctatgtttgggtggacccagtttctaatggccggcatctgcagatcaaggttaccggagaactctaaaagccggggctttcctgctagacaagactcatttctggagctgctttaaaaagaaacaaaacttcccaaggaccccttttcctccctgtctgcccaaaataatttcttaacaactcgtataacacctgaattcagcccccttactgggggaatgtaccaacggaactcccacctttcctggtttctcaaggctagattgtgtaaacctcctgggtctcggtctgtgtctgagcagctgctctgccaacactccacacagccctgtgtactaggcccaaggccgccgtgactcagcccatgggaggatctcctgatttcttggttgcaaagatccatgggagaaaaatggtttctggggcggggtcacacactcatggcttctcttggctgtgcaagaaggttcctttggctctgttccaatatagcgtggttcatcacccacccctgttttctttgttctcctgagtcaagttgtttgcctagtcagtcccaatgtgagaacctgaatatttcagttcacgtgcttatcgtgaaattcactgagactttaattcagtggaaggcagcctcttctaattggccatcttggcccgccccctccacgtcacctcccataaaatggccacgctctccagggacgatgccattatatatctttacgtgaaaccgacagaacacttattacactttttgtgagctcatttacttcacttataatgaacatggccatggaaatgctagtggagaaagtggtcgattttctgatggatgtgataaaaaaatggtttgccgaccaattaatgacatatgtctcaaaactagtaacgagacccttaatcgctgggttgaagtttctaatcaagaagatgctcatctatgtattcaacaaagcagcttcccttgcttctgaaatgcttccaaacaacatctcatatttcctgaagaagataatgcctggacaagcagcacaagtcattcaggtttactttcagctcataaatccagcaggatattcgcacaattgttgggaaaccttatcagttcatgagtcgtgcatgtttcctttaatttcaggaggaagagggtaatctggaagagtttcctgacctactctgctgctgtgattaaacaaccaccaggaaattttgatgacactgttctcctgagctcctccctttcctcggggaagaaaagcattgaaactacaaaaataaagtgttatttggctggagtgaggtctcatgtctgcttatgcggtggctcgctgctcagaacagggtgagtctctgagttgtacgctgaggaggggaggctgtcaatctagaaaaaacccattgcatgggacacctccatggggtctggggggctgaggatgaggagctggactggatctagggaaggaggaggtttcagagggtgaaattctggcagtaaatcctgggggtgtttgaaaacttcctccctcagaaggagaagactcagggaggaataaggacaaaccatgggtcccttgaggggcatttactaacttaagaggactttatcgggaagcagagtgacaatggcctccttgaggactgaggcccctggataaatgaggcccagatccagatccagtccatgggagatgagaccttcaagggacatatttttgttgggacagaggaaaagtgcagctctgcagctgcagaggaagccttggcagtgtgaaagcgaccttggagggggccctgtgcgttctgaatgcttctgaggtccatcccctgtccccgcctctttttctggattttttgggctccatggtctccgccatcttctgagcgctccacgctgccaccttcagttttctcttctgggctccaaatactccaaaatctttcatatctgtgcccctacccctgtttttagcatgtgttgggactccaggtccctgaaggtttctggcctgaaatccacctccccagcggtgtggattctgctctagagaccccgcacttggcaaggttcccaggcccctgggggacaaccgagtggtatgtgcacttcagggctccacactcggcaaggtctttcaagcccttggggttccctcctcagttttcttcacatgtctgggatgtagtcactctataaatgccgggatgtgatccccaccccagtgattttttttagttccatgagtgttgctatctgaatagtcatcctgagagtgatgggaccttttgaatttgcagcaagttttagattagtgtgagtggcctgagatcgcaaaactggggctagcattggatgtgaggttaggctggtggaaaaatttgcccagaacctgaggagtgtgggctcactgcaggtggttaggatcagcacagaattgcaaggatgtatagctttggggtaaagaataacatggttcagaagtacatgtattagtcttttcatgcattgctataaagaattacctgagactgggtaattaattataaaaactcaggtttaattggctcatggttccacaggctgtacaaaaaggatgatgctggccatcagctcaacttctggggaggcgtcagaaaacttagagtcatggcaaaaagcacaagggaatcaggctcatcctccatggccagagctggagctagtggtaggagaggtgctgcacacttttgaacaatcagatctttttagaactctatcaccagacagcacctagaggatggtgctaaattattcatgaaatatccacccatatgatccactcaattctcaccggcccaaccaggaccacctccaccattggggattacaattacacatgagatgtgggtggggacacagatccaaactcgatcagtgggcatcttggactgggtctactatagaagaagaaccaggagctgactatcatccttaagactgcccatgatggccaggcagggtggctcatgcctgtaatcccagcactttgggaagccaaggtgggtgaatcccctgaggtcaggagtttgagaccagcctcgccaacatggtgaaaccctgcctctactaaaaacacaaaaaattagatgggtgttgtgccagacgcctgtaatcacagctactccagaggctgaggcatgagaattgcttgaacctgggaggcggaggtggcggtgagccccaatcgcactgctacactccagcatgggcaacaataccaaaacatcgtctcaaaaaaaaaaaaaaaaaaaaaaaaggctgcccatgaccactgccccagtgagagggacaccagcatggctaagatcaagtgctggacattcttcatgggtcagacattaaagcaggccacactgttacagagatgggctccattcatagcaacaaagtggtgagaagatgtgggaatggcagaggccagcactttgccatcaatgcaaggtgggcataaggagctggcaccagtgccagagtgcatcaggggaggactgctttgcaatatctagcacttacctcttagagtatgtttcattagggacaacagatataaatggcagacaagtgagtcccttcagtaacaggaaatagaaatcatcaagaggaacagaaacagatgtcagcagccctcatataaagtcatcatccttcatccagttaaaacctgagacagttctcacataagaaggtctaattcaaaaagagactgggttctcatgaggcaggttcatgcaaaaccaagggaagtatacaactttgggattctccagcttcccttggaaaagacctacaatcatttgcttaggtaactgagcactgaacaaaggtgagtattgttatctttcagaagctgttggccatgaaggtcttgctggcataaaacccatggttggaaacatcaccatgacccctgttagagtaatggcctaagggcaagggtcaggaaattgatgtattccttgccaacttctgcgagacgagtgttggtccactcatctctttcacggaattcaccagtctggtatcttcaaaatccagaaggatgatggcagatggcaggaaactaatgcaaacaccatcagttgtacctccactgtagcagcagtaatggatgttatctcttcattgtaatatccagggagggagaagatgacattattctcaatattctaaacaccctgtgtgtacagcctctgtgatattttttgtaatatccgtgtgggagagaattatattactcctaatatctcaggggttgtgccccctctgtgacaatgttcctaacacccaggaggggataggatgatatcacttttagcatcacagggggtgtacaccccactgtaatattgttcataatatccgggggggagagaatgatattactcccaatatcgcaaagactgtacaccaacctgtgatattatttgtaatatccataagaggaagaataatattactcccaatgtcacaggaagtgtacacccttctgtgatattgttcaaaagatccagttagggaggggatgatattactctcaatatcttaaacaccctgtaggtaagccctctgtgatattcctcataatatccagagggagaggatgatattactcccaatattgcatgaagtctacaccccacctgtgatattgttcctaatatccaggatgggagaggatgatattactcccaatgtcgcaggggatgtacaccttccctgtaatattgttcgtaatatctagaaaaggagaggataatattactttcaacatcgcagggggtgtacaccttccttgttatattgttgctaatatccagggaaaaagaagatgacattaccaccactattgcagaaggtgtacacccccccttgatatagttcctaatatccagaaaaggagaggagatattactccaaatattgcaagaggtgtacattcccctgtaatatttttcctaacattcaggaagaaagagagtgatattgcccttaatattgaagggagtgtgccccccccgtgatattgtttctaatatccaagaaatgaaaggatgatattactcccaatatcacaggggctgtacagccccctcccatgatattgttcccaacatcggggggggggtgaaatagtattattcccagtatcacaataggtgtacacacctgtcgtgatattgttcctaatacccatgggggaaaggacgatattattcttaatatctcagagggatgtacaccctccctgtgatattgttcctaatatccggggtgggagaggatgatattacccccaaaatctcaaagggtgtacacccctcttgtgatattgttcctaatatccagggtggagaggataatattattcccaatatccaggaaaggaaacgatgatgttactgtgaatattccagggggtgtcctcccctctgtgatattgttcctaatatccaggttggggagattatgatatttctccaaatatcacaaggggtgtacaccaaccctgtgttattgttcctaatatcgatggggggagaggacgatattactcccaatatcacagggggtgtacaccacctttatgatattgttcctaatatccatgaagaaagaggatgatattactttcaatatcgcaggggatgtacactccccctgtgatattgttagtaatacctaggagaagaaagtgtgatattactcccaatatcgcaggggatgtacacgcttcctgtgatattgttcctaatatttagggggaaaggggatgatattactcccaatatcgaatggtgtgtacacccccccgtgattctttttttttttttttttttttttttgagatggagtcttgctctgccgcccagactggcgtgcaatggcgcaatctcggctcactgcaacatttgcctcccaggttcgcacgattctcctgcctcagccttcggagtagctgggattataggcagctgtcaccataccaggctaatttttgtatttttagtagagttggggtttcaccatgttggtcaggctggtcttgaattcctgacctcaaataatccacccaccttggcctcccaaagtcctgggattacaggcataactttccctgtgatattcttcctaatattcaggaagaaagaggatgatattgctcccaatatcgcagagagtgtgcactcctcctgtgatatggttcttaatattcagaggaggagaggatgatattactttctatattgcagaaggtgtacacctccctcgtgatgtctttcctaatatccagtgggggagaggttattagtctcaaaatcacagaaggtgtaaacccccatttgatattgttcctaatattcaggggtggggagagaaaggtattactcctagtatttcagggcatgaacacccccaccgtgatatcattcctaatatccagaaggggaggcaatgatatttctcctaatatcacaaagggtgtacaccccttctgtgatattgtaaatattctgtgtgtacacccccctgtgttatagtctgtaatatccgggtgggggagagggtgatatttctccccatattgtaggggatgtacacccttctgtgatatggttcgttatatccagggaagaaaaaggtaatattgctgcccatattgtggagagtgtacacccccatgtaatatggttcgtaatatccaggagtggagagggtgatactgctccttacatcgaggaaggtgtacaccttattgttatatgattcgcaatatccaggggaggagagagtgatattgctccccatgtcgcagggggtgtaaaccctccgtgatatgattggtaatatccaggaaaggaaagggtgatatttctccccatatcgcgggggacgtacatcctcctgtgatatggttcgtaatatccaggaggaaagaggaaaatattgctcttcataacccgaggggtgtacaacccctgtgatatggttcgtaatacccagaagtgtacacccctctgtgatatggtttgtaatatccagggggttagagggtgatattgctccccatatcgcagtgggggtacacccccctggattggttcataatattcatggggggagaaatttacatttatcctcatatcagggggggtgtacaccccccgtgatatggttcgtaatatccaggggaagaaagggtgatattgctccttatatcgcggaaggatcaccctcccctgtgatatggttcataatacccagacgggaagagggtgatattgttcttcataaagcgaagggtgtacagccccctgtgatatggttcataatatgcaaaaggggagagggtgatattgctccccatatcacggagggtgtactcccttctttgatatggttcgtaatatccaggggtgtagatggtgatatagctcgccctattggggagggtgttcacccctctgtgatattgttcgtaatgtccagggaaagagaggatgatattactcccaatatcgcagaaggtttacaccactctgtgatattgttcataatatccagggaaggagaagacgatattactcccaatatggcagggggtgtagaactcctgtgatattgtttgtaatatccaggcaaggagaggatattactctcaatatcgcagaaggtttacacccctatgtgatactgttcatgatatccagggaaaaagaggatattactccctatatcacaaagggtgtacacccctttgtgatattttttgtaatatccaggggagagaggataatattactctcaatatcagaaggggtgaaaaccctcctgtgtcattgttcataatatttagggaaggagagagtgatattactccaaatatcacagtgggtgtacacccccctatgatattgttcctaatttccagaaggggagatatgatattattgccaatatcgcagaaggtgtacaccttactctgacattgtttgtaatatccagatggggaaatgatgatattactcctaatatcacagggggtgtacacccccttgttttattgtttgtaatattcaggggaagagacgattatattactcccaatatcgcagggtgtgtacaacactctatgatattgttcataatatccaggggaggagaggaagtgtacacccccccgtgatattgttcgtaatatccagaggtagagaggatgatattactcccaatattgcaggtggtgtacacctttctgtgatattgtcatgatattaagaaggggagaggatgatattactaacaatatcacaaaaactgtacactccctgtgatattgttcataatatccagaagaagggaggatgatattattctgaatctcgcagaagatatacaccaccctgtgatatggttcataatatcctaggggaaagaggatgacataactgtcaatatcgcagggggtgtacaattccctgtgatattgttcacaatattcagagggaaaaaggataatattactttcaatatcgcaggcggtgtacacattactgtgttattgtttataatatccggaatgagagaaaattttctcccaatatcacaggaggtgtacactcccctgtgatattgttcgtaatatccagggaggggagaggatactattactcccaacatctcagggagtgtaggccccccctttgatattgttcctaatattcggaagtggagaagatgatattacttccaaaatcgcagggggtgtacactccctctgtaatattgtttctaatattcatgagtggaaagaaagatattactcccagtattgcaggggacatacaccacactgtgatcttgttcacaatattcgggggggagaggatgatattactcccaatatcaaagtaggtgtacacccccttctgatattgatcgtaatatccagaattaaagatgataacgttactcccaatattgcagggggtgtacatttttgaatactgttcataatattaagagggggaggggatgatatctgtcccaatatcgcaaagtgtgtacacctcctgtgacattgtcccaaatatccagaggaaaaaaggatgttattactcttaatatctcagagagtgtacacctccctgtgatattgtttgtaacatccagaagaaagaggctgatattactcttaatatcgcagggggtgtacacccccgccccgggatattattcgtaatatccagggggaagtggaatgttcagaatgggagaggatgatattacttgcaatatcatagtgggtgtacaccccactgtgatattgtttgtaatatccgggaaaggagaaaatgacattcctccccatatggcaggggctgtacaccacctatcatattgttcaaaatatccagaaggggagaggatatgtctccaagtatcacagggggtgtacaccccgctgtaatattcttcctaatatccagggtgtgagaggataatagtactcccaatatcccagggcatgtacaccccccttgtgatgttgttcctaaaattcatggggagaaagaatattactcccaatatcacagggggtgtacatacactctgtaatattgttgccaatatgcagcaggagagaggatgatattactcccaatatcacaggggctgtacaccccgctgggatattgtttctaatatcaagggggaaaaaggatgatattactcccaatgtcgcagggtgtgtacttcctctttgtgacattgttcctaatatccaggagagaagagggtgacattccttccaaaactgaaaggggtgtacacaccctttgagatattgtctttaatatccagaacgaaacaggatgatataactcctaatactgcaggggggtacaccctctctgtgatactgtttctaatatccaggaggggaaagaaaaatattaatcccaatatcacagggggtgtacattccccctttaatattgttcctaatatccaggaagacacaggatgatactatttccagcagcacagggcatgtacacccctttgtgatattgttcctaatatccaggaaaagagaggatgatattactgtcaatattgcagggcgtatacactggttctgtgatattgtttctaatatccgggggtggagaaaatgatattactcccaatattccagcgggtgtacacccgttctatgatattgttcctaatatctgggggagagagaatgatattattgtcaatatcacaggggatgtacagattccctgtgatattgtttctaatattcacagggggagaagggtataatactcccgatatcgcagggggtgtacactccccctgtgaagttgttcctaatatccagggattgagagaatgatattactcccaatatcacaggcggtgtaaaccccctgtgtgatattgttcctaacatccagaggaaaagatgatgatattattttcaatatcacagggggtgtacgcatccctgtgatattgtttctaatatccaggggaggagaggatgatattattgttaatatcgcagggggtgtaccccaccctgtgatactgttcctaatatccggggtggaagaggataatattgctcccaatatcgcaaagggtgtacaaccttcctgagatattggtcctaatatccagggagggagaggatgatattactttcaatatcacagggagtttacacaacccctgcgatattgttcctaatatccagcggaagaagagttaggataatactattttcaaaattgctgggtctgtaccccctccccgtgatattgtttctaatatccaggaggggagaaagtaatatgactcccaatatcttagaagatgtacaccctccccataatattatttcttacatccagggggtagaggatgattttgctttcaatatcacagagggagtaaacctttccggtgatattgtttttaatatttaaaaagagagaagataaaattactcccaatacaaaggggatgtattgtgtactcccccctctgatattcttttttaatatccagatggagagaggatgatattactttcaatattgcatgggatgtataaatcccctgtgttattgttctgaatatacaggtggggagagtatgatattactccaaatatcgcagggggttctttccccctgtgatattgttcctaacattcagggagggagaggatgatattactcttaatattgcagggggtgtacccacgcctatgatattgttcctaatatccagagggggagaggatgatctaactcagaatatgacaaggggtgtacacacagcctgtgatatggttcctaatatacaggggagaaggggataatatttctcccaatatcgcagggggtgtacaaccccctgtgatactgttcctaatatacagaaggggacagcatgatattgttcctaatatcgcaggaggtgtacaacgccctgtgatattgttcctaatatccagggcgggagaggatgatattaccctcaatatcgcagggggtgtgcactttccctgttatattgttcctatgatccgggtggggggaaatgacattagtcccaatatcgcaggatgtgtgcaccgctcccccgtgatattgttcctaatatcaagggggagagaggaggatattactcccaatatcgcaagggatgtacatcctccatgcgatattgttcgtaatattcaggaggagagaggatgatattactcttaatatcgcagaaagtggacacccaccctgtgatgttcttcataatatccagggaagcagacgattatatgactttcaatatcgctgggagtgtacatcccttttgggatattgtttctaatatccaggaagggagaggattatattactctcagtattgcaggcagtgtacaccttttttgtgatattgttcctaatattcagaaagggaaaggatgatattactcccaatattgcaggtggtgtatatccccctctgatattgttccttatatcaaggaagagaaagaataatattactcccaatatcaaagacagtgtagacccctcctgtgatattgtatttaatatccatggggaaagaggatgatgttactcccaatatcgcagggggtttacacccacactgtgatattattcctaaaatccagtggaggagaaaataatattgctcccaatattgcagggtgtatacaggccctcccccgttatattgctcctaatatccagcggtggagaggatattactttcaatttgtgtagggagtgtatacccccctgtgatatttttctaatatcaaggatgggaaaggatgacattactcccaatatcgcaggaggtgtacacgccctgtgatattgttcctaatatctagggaaggagaggatgatattactttcaatattgcaggagctgtacaccctctgtggtattgttcttaatatttaggttgggagaaaatgatatgagtccaaatatcgcagaaggcatacacacttccaataacattgttcttaatatccgggggagagggtgatattactcccaaaatctctggggggtgtacacccccttctgatatttttcctaatatccagggaaggaaacgatgatattactataaatattccaaggagtgtacaccttcctaatatcctaatattgttcctaatatccaggggtgggagaggattatattactcccgatatcgcagtgggtgtacacccctcctgtgatattgtttctaatatccaagctaggagaaaatgatatcactctcaataccacagggggtgtacaccttccgcatcatattgttcctaatattcagagggaaagaagatgaagttactttcaatatcggaggggttgtacacaacccctgtgatattgctgctagtatccaggaagaaaggggattatgttactccccttatagcagggggtatacacctcccctgtaatattgttcctaatatcaaggctgggatatacgtggggggaaggatgatattactcccaatatcgcaggggttatacaaccttctgtgatattgctcctagtaaccagggcagaagaagatgatattactcctaatatcgcaggaggtgtacactcccccattatgttgttcccaatatgcagaaaaggagaggatgacattattgccagtatcgcagggtgtgtacaccacccctgtaatattgttccaaatatttagggggagagaggatgatattactcccaacatcgcagggggtgtacacacatcccctgtaatatagttcttaaaatctaggggaaaaggggatcttatttctctaaatattgcagagggtgtacactccccggtgatattgttcctaatagccgggagggagataattaaattactttcaatatctcagagagtgtacatcgcccttgcgatattgttcctaatatccagagcaaaagagaatgatattactcccaatatcttaggagtgtacatttaacctgtaatattgttcctaatatccagggggaagagaatagtattactgccaatatcgtaggggttgtacaccttttctgtgatattgttgcaaatatttagtagagggaaagaatattactcgcaatatcacagggaatgtatacttcccctgtgatattgttctgatatccagaaaaagagagggtaatattactcccaatattgcagggggtgtacaccccccttgtgatattgatcctaatataaaggaaggaagaggatattactcctcatatagaaggggttgtccaccccccttgtgatattattcctaatattcagggaagcagaggatgatattattttcaatatcacagagggtgtgcagtccacctgtgatattgttcttaatattcggggggagaggatgttattatgcctgatatcgcagtagaggtacacccctcaagtgatactgttcctaataaccaggggtgaagaggatgatattactcccaatatcgcaggtggtgtacacccccccatgatggtttctaatatacagagggggagaggaaaatattactcccaaaatcgctggaggtctacaccccccttgtgatattgttcctaatatccaggaaaggaaacgatgatattactgtgaatattccagggggtgtacacccgctttgtaatattgttcctcatatccagggtgtggagaggattatattactcccagtatcgcagggggtgcacgacgcccctgtgatattgtttttcatatccaggaggggagattattatcaatatggcaaggggtgaacaccccctgtgatattgtacttaatagttaggttggcagaaaatgatattagtctcgatatcgcagggggtgtgcactccgcctggtgatattgcttttaatatcaagggggagaaaatggcattactcccaatatcgcagggggtgtacaccgctcatgtgatattgttcctaatatccaggtggagagaacataatattactcccaatatcgcacaaggtgtacacccctcctgtgatatggttcctaatatccatgggaggagatgatgatattactcccaatatcacaggggatgtacaccacccttgtgatattgttcctaatatccagggaagaaaacgatgatattattgtgaatattacagggagtgtacacactccctgtgatattgtttttgatatacagggtgggagaggatgatattactcccaatatcacataaggtgtacaccccccgtgatattgttctaaatatttcggtggggagaaaatgatattagtctccatatcacagggggtgtgtgctcctcaggtgatattgtttttaatatcaagagggggaggagattatattactttcattatcacagggggtgtacacccctcctgtgatattgttccttatatccaggcgaggggaaaataatattactctcaatatcgcaggaggtgtacacaccccatgtgatattgttcctaatattaagggggaaagaagataatattactttcaatatcacagggtttgtactcctttcttgtgatatagtttttagtatccagggggaaagagcatgatattactcccattgtagcaaggggtgtacacacctcctgtgatattgttcctaatatccagaagtggtgaggatgatattactcccaatatcgcagggggtatacaccccacctatgatattatttctaatatccatgggaaaagagtatgatattacacccaatgtcgcagagggtgtgtatttttcctgtgatattgtttctaatattcaggcggggagaagatgatattactctcaatatagcagaaattgtacatccccgctgtgatattcttcataataatcagggaaaaagaggatgatattactaccaatattgcaggggggttacacttcccctatggtagtgttcctaatatccaggaagaaagaggatgatattaatcccattatccaggaagtgtacacccaccctgtcatgttgttcctaatatccagcagggaagaggatgatattacaccccccccccgtgatattctccttaatatccaggaggggagaggctgatattactggatatatagcaggggtgttcataccttctgtgatattgttcctaatatccagaaaaggagaggatgatattacttccaatatcgcagaaggtgtacacctccctgtgatattgatcctgacattcagaaggggagaggatgatattactcaaaataccgcagggcatgtgcattcccttgtgatattgttcctaatacccagaagggaacaggataatattactttcaatatcgcagggagtgcacacccccctttggtatggttcttaatatccagaaggaaagagggtgctattactttccatattgcaaggggtgtacaccccactgtggtatggttcataatatccaggcagggagagggtgctattactccccacagtgcggggcatgtacaccctgctgcggtacggttcctaatatccagggggagagaggatgctatgactccctatatcgcggggtgtgtacacccctgtgtggtatgttttgtattctccaggaacggagagggtgttgttacccctcatatcgctggaaatgtacactcccctgtggtatggttcgtaatatccaggggattgagggtactgttacccccatactccccatatcgtggggggagtgcacctccctgtggtatggttcgaaatatccagggtaagagagggtgctattattccccattttgcaggaggcgtacacccccctatggtatggttcgtaatatccggggtgaggggatgctatcaaaagaagagagaaagagaccccccatattgttctatattattttatactcagtacctgttttaagaagaaacaaggaagtgaaaccaaaagcaggcagcccggcgccaggcaccagacccaaaaccagacccgaaaccaggcctgggcctgcctgaccttagcctgatagttaaaattcaacccatgacctagcaaccaatgttatccatagattccagacattgtatggaaggacattgtgaaatttcttgttctgtgctgtttcactctgattaccggtgcctgcagcccctgtcacatacccactagattgctcaatcaatcatggccctttcatgtaagatctttagtgttgtgagcccttaaaaaggacagaaattgtgcactcaacaagctcggattttgagacgctagtctttcgatgcttccagctgattaaaagccacttccttcactacctcggtgtctgtggggttttgtccgcgactcctcctgctacactatgactccccatatcaaggggggtgtacacccccctgtggttcgtaatatccagcaggggaaaaggtgctattactccccatattgcagggagtgtacacccccttgtagtatggatcgtaaaatcaaggggggagggaaggtgtaattatccccatatctcagggggtgtacacccctttgtggtaaagtttgtaatatccagggatattacagggatattatccccaaattaatacttttataatttcttatgcctgcctttactgcaatctctgaacataaattgtgaagatttcatggacatttatcacttccccaatcaatacttttataatttcctatgcctgtctttactttaatctcttaatctcatcatctttgtgagctgaggatgtatgtcgcctcaggaccctgtgatgattgcattaactccacaaattgtttataaaacatgtgtatttgaacaatatgaaatctgggcaccctgaaaaagaacaggataagagcgatgttcagcgaacaagggagataagcataaggtctgactgcctgtggggctgggcagaacagagtcacatttttcttattgcagaaaatgagtaggagaaatatcactgggaagggaacgcattcctaggggaggcctatggacggccgctctgggggtgtatcccttatgtggttgaagataagggatgaaatacaccctggtcccctgcagtgccctcaggcttgctaggattagaaattccagcctggcgaattctagtcagaccagttctctgctcttgaaccccgtttcctgttaagatgtttatcaatgacaatgcgtgcacagcaggacatggaacctcaatagtaattccattttctccctggccttgtgaccttgctaggcccttctgcccttgtgatcttttattgccatttgaagcatgtgatctctgtgacccactccctattcgtatccccctccccttttgaagtccctaataaaaacttgctggttttgcagatcaggtggtcatcacagaacctgccgatatgtgatgtcaccccggaggctcagctgtaaaatttctctttcgtactctttcactttatttctcagaccaggtgacacttaaggaaaatagaaaagaacctactttgaaatattgggggctagttcccccaatagacattgttcctaatatccagaaaaaaagaagatgatattactcccaatatcacaggggttgtgaaccccacctgtgatatggttcctaatatccaggaagggagagaatgatattactctccatattgcagggggtgtgcacatccctgtgatattgttcctaatatccaggggaggagagggtgatattactcccaatattgcaagggttgtaaactccaccctgtaatattgctcctaatatttaggatttagggggggagaggataatattactcccaatatcgcaggggatgtatatgccctctttgatattgttcctaatatccagggggggagaggataatattactttccatatcacaaagagtgttcacccccctgtgatattgttcctaatatccaaaaaggaagaggatgatatcaatcccaatatcacaggaagtgtacaccccccccttttatattgtttctaatatccaggggaaatgagggtgatatttctctcaatatagcagaatgggtacactccccctgggatattattcctaatatccaggggaaaaaaagaggttgatattcttcccagtatagcagggaatgaatacaccctttgtgatattgcttctaatatcaaggggaaaagaggatgatatgactcccaatatcacaggggatgtaaacctgtggcgttgttgctaatatcaaggagggaagagtatgatattactcctaatgtcgccgaaggtgcacactttccctgtgatattgttcctaatatccaaaagggaagagaatgatattacccccagtattgcagggtgtacaccacccctgtgatattgctcctaatacccaggaaaaaagagaatgctattacccccaatatctaaggggacgtataccttccctgtgatattgtttctaatatccaagtggggagaggatggttttactctcaatattgcagggagtgtacactccccctgtgatactgtttctaatactcgggctgggagaaatagtattactcccaatatcgcagtgatattgtttccctgtgatattgtttctaatatctagtgggggagataattatattactaccccatacacaggggagggtgtacattcccctgtgatattgtttgtaatatccagggaaggagaggatgttactcccaatatcacaggggttgtacaccccttttttgatattgttcctaatatctggggggcagagaattatattactgtcaatatcacagagtgtgtacaccccctctgttatattactctttatattcagggcggtagaggatgatattactccctatatcacagggggtgttcacccctcctgtgatattgtttataatatctaaggggaaagaggatgatatcactctcaatatcaaaggaaatgtacacctttcctgtgatattgtttttattatataggggggcagaggatgatattaagaacaataccacaggggatgtacacccacgtattgatattgtccctaatatgtatggggaaagaggacagtgtaactcccgatatcgcagagtgtgtacacccccttgtgatattgtttctgatatacacggggagaaaagataatatttcttccaaaattgcagggggtgtacaaccccctgtgatattgtttttaatatccagtgggggagagaatattactcccaatattgcagggcgtgtacacaacccctgtgatattgttcctaatatccagagtaggggaggatgacattactttcaatatcgcaaggggtgtacattcccctgtgatattgctcctaatatccatgaggggagaggatgatattattcctaatatggcaggggctgtacaccttccctgtgatattgtttctaacatccagtgggggagaaaatgatattactccctatatcacagaaggtgtacactttccctgtgatattgttcctaatatccagaaggggagaggataatattactcccaatatcgcaggaagcttacaactcccctgtgatattgtttctaatatccagggaggtagggatgatattactcccaatatcgcaggggatgtacactcccccgtgacattgtttctaataaccagggggtgagaggatgatattacgcttaataccgaagggggtgtacacacccttgtgatattgtgcctaatagccagggggaagaaaattatattaattttaatatttatggggaaaaaggatgatattactcccaatatcacaggggctgtacaccgaccttttgatattgtttttaatatccagaagagaagaggataatattgctcccaatatcagaaaaggtgtaaaccccttctgtgatattggtcctaatatccagggagggagagaataatattactaccaatatcacagaaggtgcccacccccaaggtgatattgctcctaatatccaaagataatagggtgatgttactcccaatatcacaggaggtgttcacaccccttgtgatattgtttctaacgtacagggaagggagaggatgatattattcccaatatcacaggaggtgtatactcctctgtgatattgattttaatattcggggggaaaggatgatattactccctatatcgcagagggtgtacaccctctgtaatattgatcctaatatccagggcgggataggatgatattactcccaatatcgcagaaagtctacacaacccccagtaatattgtttttactatccagggggaagaggatgacattactcccaatttcacagagtgtgtacactcaccatttgatattgtttctaatatctagggggagagaatatattactcccaatatcacaggaattgtacaccacctctgtgacattcttgtgaatatccggggaaaaagagaataatattactcccaatattgcagagcgtgtacacccctccatgatatcgatactaatatttttttaaagaggatgatattactcccattgtcacaggatgtgtacaccccccttgtgaaattgttcataatattctggggggagagcataatattactccccatatcgaaaaaggtgtccaccctccttataatatggttcctaatatccaggatattacttaatccaggatacttgtaataccctaaatatacaattgcttgaacctccacctcccaggttcaagcaattcttctgcctcagcctcccgagtagctgggactacaggggcacaccaccacacccagctaatttttttttcttgtatttttagtagagatggggttttgccatattggccaggctggtctcaaactcctgaccttgtgatctgcccacctcagcctcccaaagtgctgggattataggcgtgacccaccgtgccaagccaggaagaggatgctctatagatttccccaataagagatggctttgcagggccattccaaaatatgtcaaagaaatacatttggggataaaatactttgatttcctttagggaatgttatctattatgtgatgctataccagagtcaggttggagtcggttatcttattgcaacaaagagtctgttccgtcactgttgggatctctattttttcctcttatttcttgagacagggtctcactctgtcacccagtctggagtgcagtggtgcgatcttcattcactgaaacctctgcctcctgtgttcaggtgattctcgtgcctcagccccttaagtaactaggattacaggtgtgcgccaccacacccagctaatttttgtattttcagtagagatggtattttgccctgttggccaggctggtcttgaactcctggcctcgtgtcatctgcccacctcgacctcccaaagtgctgggactgcaaatgtgagctattgtgcccagccaggatctctgttttaatgttagtgctggtcactttgcatgaactccaaagggaagaaatataatgaggtgtgtctgaccccctgccttctcatcgtgacctgaattagtttttcaggtttgcaggggatacccttggacaagaaggggctctattcggttggttggggggattagaattttactttttgtttacaatatttctcctgaaagagttaggggctcacaaggaatttccgcgtgagcaacttatgaggaaagccatctgggaagatatgtgtccttgtgtcactgggatattctcgtttaccccaatgatacggcaatgacgcagggttgtgaaattacagctatgtgtttggggaaaaaagaaagcaggattgtgtgactacgtttccaaacttcacttgcccttagccatagtgagttgggggcctggagattctgttttctttcacaatgatatagatacaattaaatgtatagaaagcaaaaaaataaaaaggtgagtaatgaggaacctctgattcctgagtggccatgtagttacccatggcacagagccacagttactgaaggtaaagtttgctggggaatttagaaatgaatccagctcttggaggagtcagtttactggatgcctaagaaaatgcaaacaaaataagaaaaaagggtaatattcaatcccatagttattgttacctgtcatagctaaagtaaaattaaaacagagtgctggcttcaatcttgatgctacactaagcttagatttcagtgaatgtgagtctcagccactagctcagagccacctcccaaagaccaaatcatgtagggacaatagaaagtacttctgagaattgtggttaccaagaacctagtaactgttggggaggagcaaaacaaagtacagaaaccagagggtacaatctgagtgagactgctatcagcttctggaggagcctttactaaaatgaatgatgagagtaactggatgatgagagtaactaatggatgatgagagtaagcaatgtctttggttttcttttttttttttttttttttttagcagacgtctcactcttgtcgcccaggctggagtgtaatggcatgatctcgcctcactgcaacctccacctcctgggttcaagcaattctcctgtctcagcctcccgagtagctgggactacaggcactcatcaccacacctggctaatttttgtatttttagtattttctggtgagggtccaggtttccggaaacaactcagagacatatgttaagatgttatctttagttttcacagggaaccaaatatgttacgactccaatttccttggctattgttttaagttaccattaccttctcgttgatcaagttgctcatttacttctcaagcctagctagatgcctggaatttcccttgaaggaagtcaagattttcctttatctccatactggctgatggtgatcgagtaagcccctaagaggggtccctgctccatctcgagatgctgctagattctacagtgcctaataaacagctctcgcctggccgacaaagagctgcttgctctctggatagcaattccaaagtgaacagacaacatcctgtttggaagactgccactctgttagaagaagcatcaggaaaacctttcttttgagctatttataactaacagcaattgaccaagtatacttttgtgagtgaaactgacctttctccctgtaagaattctccaaaatttggaaactatttgtgagtatttttacttatggcaatataattattggcacaagctcaatcagattcggttttctttcgtaacaggaaccattggagatactcattactctttgaaggcttacagtggaatgaattcaaatacgacttatttgaggaattgaagttgactttatggagctgataagaatcttcttggagaaaaaaagactgggtatattttcaatatgctttccttttaaggtccctcacctgtggaaagtaaagaatgtcactttctgacaggctcaggaacctcaagttatgtagggatctcaagaagatgggggaattcacccagttcatacaggtgaaattgctgttgcaaagattatgaatatgagagaagtccagcatggctgacttcatctcgtgtctggcctcaggctggctgcccttgctcactcttgggcataggccaagctagccatgggaggaatttagtttatagtttaactttgaagcacggatgataatagtctctccctaaaatgaaccccttccttgctcagggactgaaactacctttgtatgacaaatgaaagcccacaagattaagattatgagaggggcctgaattctgctaaaatgcaggtgtagctgactgataacaagtcattgtcccacagcttgcctttctataatctcttgcttctcaggagtcacatggccagaggtcctgagatttccagtcctgtgacccccacccagagatggacttagtgcatgaggaccattttccacacccctatgatttcatcctcaaacaatcagcagcaaccattccctagccccctgccttccaaattatccataaaaatcctagcctctgagttattagggagattgattaataatcccagtcctaccccttgggttgctctgatttaattaaaccttctctactgcaataccacggactcagtaaattggttttgtctgtgcaatgggcaagaagaacatgttgcatggttatacaggtactacaagcacagtctgatggcaaattattggttttgcttcctgcccttgatgtttctaaacatctagtccaaaattacttgtgaaaggtccagcaaagccaattttaaaagaggctatatggccaatcactattctttctacacattattgcaaataatcaggccacggctgggcacggtggctcatgcctgcaatcccagcactttgggaggctgaggcaggatcacctgaaatcaggagttcaagaccagcctaggcaacatgataaaaccctgtctctactaaaaatacaaaattagccaggcatggtggcatgcacctgtaatcccagctacttgggagactgagggaggagaatcacttgaacctgggaggcagagattgcagtgagctgagatcacaccactgcactccagcctgggcaatagagtgagactttgtctcaaataataataataataatcagaccaagtataatgaaattaaaatttattttgcaaataaattggtcctactacaatttatccttcatagaaatgtggaaactgaagataaaaaaaattaggtttcagaagaaaactatactacacctgttattagattctagccctaaacattgtttttgaggtttttattatttacctgcaatttggtctaaattctgaattatttcctgactacaagtatccaaggaataaatgggttttctttttctttatgatagttttagttggcttctaatgcaacaacaatttttattgtaatcctgtgtgcattctattcctactattcaaattattaatgttatagatctttcattgtagtacttctgaattaaccaaaatcacagtattctgaagatgattctacaaagcctgctgtttctacaaaggctgctgatgatttctacaaagcctgctgtagtgttgctgtggcctctgcttaaaaaagtagaaaacacattgatgcagcatgttcaccccaacctccctgcctaaaggctcagggaccatcttggaagaggaaggcgcgtgagattgtaagagccgaattagggggatggagtgtggagaataaggacacttcatcttggatgctcacctgccaaattgacttctgatgaaagccagctccagaaatgtgcctacagttactactttcacctaaaccctgcccttagtcaaatccttctcttcttctaagcaatcaacttcaattccttgtataacccacagtataaaagggcttttataccattctatcctattgcatgtaagccttgggtctgggaggtaacagtgtgggattccaccatctcatctccctgccacccaaacatgcctgctcttctttaagcaatattaaatgtttgtacttcagaaatttgatttgtcagcctcttcttcagactctcagcttctttggcctttgggagtaaatttgcataggcctgctcaaaacaggatgttctgggggtttgggggtgttgttttgttttgttttttgttttgtttagagacagggtctcactctgtcacccaggttggagtgcagtggtgcaatcatggcacactgcagcctcaaactcctaggctcaagcaatccccccaccttggcctcccaaagttctgggattacaagcataagccaccatgcccagccctggacttttctttaaagacatttacacagtgtaggaattactgtgggtgcactgctcaggtccccttctccaggatgctcattcctacctcatagatgattttcctgcagagatttgacctcagctgaagggcagtcacctggtccaggtggttgctattcacctccttcctgagaacagccaacagccagggacacgctagcacagagatataagagcgaccaaggtgaggccccttctgtgctgcggtgcatgctccagagcctccctgggatcagacttaagagggtctccagccagatctggtcttcgctgctttcctcgagctccccagcgcactcctgcaatgcatcttttttttttttttttttttttttgagacggagtttcactcttgttgcccaggctggaatgcaatggcgcaatctcagctcaccacaacctctgcctcgcgggttcaagtgattctccttcctcagcctcccaagtacctgggattacaggcatgcaccaccacgcccagctaattttgtatttttagtagaaacgggtttctccatgttggtcaggctggtttcgaactcctgacctcagttgatcctcctgcctcagccttccaaagtgctgggattacaggtgtgagccactgtgcctggcccaatgcacctcttgaatcacctcctcatgctttgcttttagagaacatgatccccaacatgtgattccagcaaagattctagaaagccaaccgtgacaatcacttctgggtttagatgacccccccccaccacaagatggcagtgagcacctcatcacagaggtgctgatggtctgcagcaccgcgccaggccagaacgtgccttttacagaagaaaataacccagtagctgactaggatggtgaggagggctggtgagcactgcggtagtgagagggacactagcatcactgagatgcaagtgatggtcatttttcataggtcaaagctcaaagcaggggacagttacagggcagggcttcatagcaccagtgtgatgaaagtatctgggagtggctaaggccagcactatgccatgggaagcaaggtgggcctgaggaggaggcagcagcgtcagcctgcaacaagtgggggctgccctgcagagacctaagagtcatgttatagagcacagtgtctgtaaggccaagaagtgtggacagccaagtgtgtcaattactagacatactcaagaggagcaggaagggcagggcatggtggctcatgcctgtaatcccagctacttgggagactgaggaaggagaatcgcttgaacccgggaggtgaaaattgcaatgagccgagatttcgccactgcactccagcctgtgtgatgggagcgggactccatctcaaaacaaaaaaagaaaaaggaaaaagaaaaaaagaaaaacctaggtatacttctcaagcaaataaaaataatcaaaaccaatatcatgcccgggcacaaatttcatatatataacagatttaaatatatgagggtgattatcctctcatatctccatttttttttgtttttccatttttttctttactaaaaaaagttaatgccaatgacacacaatttttttttttttttttttttttgagatggagtctcacttcttcgccctggctggagtgcaatggcgtgatctcgactcactgcaaagtctgcctcctgggttcaagcaattctcctgcctcagcctcccaagtagctgggaccacaggagtgagccaccacacccagctaatttttgtatttttaatagagacggggtttcaccatattggccaggctggtctcaaactcctgatctcaaataatctgcccgcctcggcctcccaagattctgggattataggcgttgagccactgcgccccgcctatgtatgattttttttttaattttattttcataagtttttggggaacaggtggtattttgttacatgagtaatttctttagttgtgatttgtgagattttggttcacccatcaactgagaagtatacactgaacccaatttgtggtcttttatccctcacccccttcccaccctttcccccggagtccctgaagtccattgtatcattcttatgcctttgcatcttcatagcttagctcttgaacccttactttctgtttgagggagaagacatatcatctacaagtagatactgtgtaaacattccattgcatgactatcccataacttatttattatttgtgtttggttatttgctgctatgtaacaaccccactcccaactaaatggtgtgacaattccatgattctgtggatcaaaaattctgaaaagtcaaacccaaggagttttgtctctgctccatgatgctaaagcctccgcaggggtgaggcgaatggctcagggtgactgaaaagctcagggttggaacagctggggatgaggcctctatgtataagatgattcttcactcacaggtctgaaactatggtggggacagccagaaggctcggctcagctgggacagtcacctgagccctacacatgacctctccaacatggtgatcctgaagcagttgggtttcttacacagcatcacacttttcttttttttttttttttttgagatgaaatattgctctatcacccaggctggagtgcagtggcacgatctcagctcactgcagcctccgcctaccaggttcaagcgattctcctgctccagcctcccaagttgctgggattgcaggcgcctgccaccaagcccagctaatttttgtatttttagtagagacggggtttcaccttgttggccaggctagtcttgacctcttgacctcaggcgatccgcctgcctcggcctcccaaagtgctgggattacaggcatgagccaccgcgcccggccaaagctcacacttcttatgattcagccttagatgtcacatcagttcattttccccacacttattagtgttagaagtcacaagcccacccatactcaggggactggcacacagaccccactctcaatggaaggggtgggacaccaccattcctgctgatgggcatttgggtaacttcctgtttgaagctattaagattgggctgctgtggccgggcgcagtggctcacgcctctaatcccagcactttgggaggccgaggcgggcggatcacgaagtcaggagatcgagaccatcctggctaacacggtgaaaccccgtctttactaaaaataccaaaaaaaaaaaaaattagctgggcatggtagcgggcgcctgtagtcccagctactcgggaggctgaggcaggagaacggcgtgaacccgggaggcggagcttgcagtgagccgagattgtgccactgcactccagcctaggcgacagagcaagactccgtctccaaaaaaaaaaaaaaagattgggctgctgtgactattctagtaggtgtctttggtgagcgcctacacgtgtttctctttttctctttagtatatgcccaggaggggaactgctggctcccagataccgtatgttcagggtcacacacacttccacagggttttccaaagcccttgtaccagcacgcactcccagcacctgtgtgactgctccagctgtcccacagtctcatcagttctattgctgatattttcattttagcttaagttatatttaataggaaaattaccgttgcctctgccccccgttcctgcctgtaggagtttctcgtagctgttgctacaggtggccacaaatctgtcacttaaacccacacaaattgatgtccttatggctttggagtcagaagtgtcaactgaaggtactagcagggctgtactgacctggtggcctcagggagcatctgtgctgcttctccaccttctagaggctgctgcatccctcgctccagccccttcctgacaccactcaccctcctacttctgttatcacatcctcaccttctctgtgttcagggctccctctgtctctctcttgcaagcacacttgggattccattgagggccacccacataacccaggagaatttctccacctcaatatccttaacaactgcagagcccttttgccataaaagttaccattcacgggttccagggattgtgacatgggtagctttaggagtgattattcctgcctgtctcccgctcaccagaacttggactttctctctcaacaggagccccctgtgtgggaatagcctgtctcaacgacgccctctataaggacctgcttcctcaaaggacctcatagtcgggtcctgcccctcagtgtccagtctgccttggctggaggggctgcaggggtgtgttggcgccacctggtggagacagggcatcacagcaggtgggagcccagtagaagcacaaccaaaacatgggtaatgtttaaaattttctggctaagcgctgtggctcacgcctgtaattccagcactttgggaggccgaggtgggtggatcacatgaggacgggagtttgagaccagcctggccaacatggtgaaacatcccctctactaaaaaatacagaaaaattagctggacatgtggcgcgctcctgtaatcccagctactcgagaggctgagacacgagaatcgcttcaaccccggaggggttgccgagatcgcgccactgcactccaggctgggcgatagagcgagactctgtctcaaaaaaaaaaaaagaagaggggaggcgaggggaggggaggggaaaagggggaatttgtttggagctgagacatccatcttctcctgacctcagatatttgcactcctggttatgaagccttcacacttggactgaatacaccaccagctttcccgatttccagcgtgcaaatggcagatcgtgagacttctcagcttccataattacatgagccaatttatatatataaattgggtcctccagaaaaacagaataaattatatatataattatacgcataacttaattaaattatacgtataacttagctatatatataatttattctgtttttctgaagaaccctactgacacaaatgttgagcatcttttcatgtgcttattggcttaataacttgtacatcttctttggggaaatgtctattcaagttctttgcccattttgtaactgaactattaatatttgtctttacattgttgagttgtaaaagttccttatatattctagatactagagccttatcagatatatttctgcaactattttctcctaatatataggttgtgtttttattttctttttctttttttttttattgagacagtctcactctgtcacccaggctggagtgcagtggcatgatcttggctcactgcagactcgacctgccaggctcaagcaattctcccacttcagcctcctgagtagctgaggttataggcacttgccatcgcacccagctaatttttgtattttttagtagagccgaggtttcgccatgttgcctaggttggtcttgaactccctgcctcaaagcgatctgtcagcctcagtctccctaagtgctggaagtacaggtgtgagccacagtgcccggccatctattttcaatagtgttttttgatgtacacaggtttggaattttgataatgttcaattcatccatttttttttttttttttttggttctttctactggaccaccactcttgagccctctaatccaacctccacgcggcagccagagggagctctctaaatgtaattactctttccctgctccacctgctcaaaacagtgtcacatttgtgatttaaaacagtatttctcaaacctaatttgcaaacaaagcaggtggaactcttcttgtatgcacagcatctgatttggttggtctggcatgggtctgggagtgagcacacctaccaagcggctgctggggtaacttgcgttttccactgatgatttcagcaatgtttccggtcccacatgctcctccagaaccttgtactcccccatgaaaaggtggagtccatttccccttcctttatttatttttttgagacgaagtttcactcttgttgcccaggctggagcgcaatggcgtgatctcagctcaccgcaacctccgcctcctgggttcaagcaatgcttctacctcagcctcccgagtagctgggattacaggtatgtgccaccacgcccagctaattttgtatttttagtagagacggggtttctccatgtcggccaggctggtctcaaactcccgacctcaggtgatccgcccgcctcagcctcccaaagtgctgggattacaggcgggagccaccgcgcccggctatttccccttcctttgaacctgatcaggacttgacgatggcatcaacatggtgagagtgaccctgcatggcttatgaggctgggttacacaaggcgatgttgcttctgactggctccctctcaggatacatgcccttggaacccatcctctaagctccttgggagcccaacttagcccatgtggagacaagacagggagagaaacagaggcacccccagccctcagccagcatcaaccgccagacaggagagcaaatgcgccaacaatgattccagctgaagcctcagacagcgtggagcagagatgagggatccctgcagattgcagatgcgtgagcaaaatgcatgctgtcactgttttgaaacaacaatgtctgggggctgtttgttatgcagcaatagacagctgtaacaatgctgttactgctgtattccatgaatgactgcactttgagtagcagggggctagatcactagataagccccatggcttctgtgtatgctatttttctacttttatatccttttcattcactttttttttttttttttttgagacagagtctcactctgttgcccaggtgggagtgcagtggtgcaatcttggcggactgcaacctccacttcccgggttcaagcaattattgtgcctcagcctcctgagtagctgcgactatagatgcacccccatgcctggctagtttccgtatttttagtagagacggggttttgccatgttggccaggctgatctcagactcctgacctcaggtgatccacccaccttggcctcccaaagtgctgggattacaggcgtgaaccactgcacccagcctcattcactttctttacttggctcatttttccttgttgcctcaattctcctctaagatcactttcctgacatttcagcctgggcctgttgccttctctgggtcccctccgcctcctgtgcctcccccatctcagccttgatccctcagattatacttcctctgtccccaccctgaccatcttggctgtccctggatagggatgggtatcttctcccactggtctgggagatctggaaggacaggcctggaaaagacttggtcactgctggaaggagctcagttagtgtggtgctgaggacagtacgggtgaggctggccccttcacccaaactcccactctcttccatagatttcacctctgtggcccaggccataggattagggcaactccccttaaacatcgagtccatcctccaagctgtccttttttttttttttttttttttttttgagacagagtctcgctctgttgcccaggctggagtgcagtggcgcgatctcggctcactgcaagctccacctccagggttcactccattctcctgcctcagcctcccgagtagctgggactacaggagcctgccaccacacccggctaattttttgtatttttagttgagacggggtttcaccgtgttagtcaggatggtctcgatctcctgacctcgtgatccgcccgcctcggcctcccaaagtgctgggattacaggcgtgagccatcgcgcccggcctcatgctgttcttgaatagtgagcacctgttacaagtcgccccaccagcctctcacttgtacccccctcatctctttctccccaagagacagaggaccctggcacttgtgaagcatgacccagaccctggggccatggcatccaacatcctcattccccatgacccctactgtctagatgtagctgccaagagacccccagactccccgggcctctgtctagagtgccaagacagagagagaatgccctgccgcttgcatgctttgtggggtgtccttcccccttccctggctgctaggcgtgacttcaacgttctccccaacccccaaacagcagcactgacaccagctgcagacctggctcaggttagctaatgaggaccaggctggggatggagcctgaacccctaaaccccagtcctgtaccccaccctaatcctggggtctccactggacaaaacgaagcagcttggtttttcgttgttattgtttttgagatagagtatctctctgtctcccaggttggagtgcagtggcgtgatctcagctcactgcagcctccgcctcccgggttcaagtgattcttgtgccgcagcctccccagtagctgggattacaggcgcgtgccaccacacccagctaatttttgtatttttagtagagacagggtttcaccatgttggccaggctggtctgaaactcctgacctcaagtgatttcccagcctcggcctcccaaagtggaagcggcttatttttaaggagaaaactcccgtggaaaggaatcagcacctcctctgtcaacatttcacttctctgaaaagactctcacttccaacagaaagtgctttgtaacacaacaatgaggctgggcgaggtggctcatgcctgtaatcccagcactttgggaagctgaggcgagtggatcacgaggtcagaagttcgagaccagcctgaccaatatggtgaaaccccgtctctactaaaaatacaaaaattagttccgtgtggtggcgtgagcctgtaatcccagctactcaggaggctgaggcaggagaatggcttgaacccaggagatggaggttgcaatgagccgagatcacgccactgcactccagcctgggcaacagagtgagactccgtctcaaaaaaaaaaaaaaaagaatgagaacatatggacacagggaggggaacaatacacacaaacaaaatttagaaacaggtgaaaataattttagtaatatttttactaatactgatatgctcaaaatattattatttcaataagtaatctaaaaattattgagatgtcttatgttcttttcatcatactaagcctttaatatttggtgtgtattttacactcacagcacatctcaatttgcagtccccatgtttcaagcactaaataaccatgtgtgtccggtggctaccatactggacagcgttgatctgaaatcgcatctgtatgcatcaccagcatatttgcagagatccccatctcagcagcacacctgaggctcatctgcgaaagcacctgcaacttctctacaacctcccacatcacctccaaacacatcctcatgtcatctgcaaacacacccatagctcacaggccaatgcctaaatatcattgcaggcaccttcagagaaagcacttactaaaggggtatacttgattccacatctgctttgacctgcaaatctcccttctcctttacatacatttgcatctcatttgtatgtcaatctaaatccactggcagagcctcagatcatcatctcaaagtcaggtggatgtggggctgggcaggcctccaggtgttcctcctcctgcttcctctggggctcttgatcctcctcctcttccttgctgctctcctcctcctcctccaatatggtgaccagttcctcccgcagcgcccccatctccagccccaggctgcacagctgtcccagcagctggacatccactcggcgcaggttcccctgccagtaggaaggggacgtcacagggatgccaccccagagagcaaggggtctctccaggacctgggtgagagcaggtcccaactcatgtcctggccacagcgcctgggcagggtcctcactgtgcccatggaccctaactgccttcctgcttctcagagtgtctcttgatctctaactcttctctttgtctctccatttcattgtccctgacttctctctctctgtctcctccctctcttatctatatctgtccctgtttccctttgtctctgtccccatttattttttgtctttccatgcccctgtctctctgtctttatgtgttgccatttctctgcccctgcctttggctctctttctctcgcttgccctctctctgccctccccaactttctcaaattcagtctgtctctccatctctgttcctgctctccgtctctgcttcccacctctgtccctctcttttgggatctccctgtccccacctctgttcccgtccctcactctatgtctgtctctcggtgtctgtacatgcctctcatgtctctgcttctatctctcagattctgtttttcgatctctggccttctctatttttgttcatttccattcattctcatttcctctctttctctttcccttccaaacccctcactcaccagctcctccctgatccacagcagactatcgcaggcacctccagtgtctgcccctgcagtcctgagggtctgaccagggatttccactggggagacctccctcagggcctgggggggtgggcccagccccggaggcaccagtccagcctgattcagctgcctccacagttccatcgtctctgagctatggctgcaaggagcaggaagtagcaaggtccagggtggcctggtcccctggggagctgtgtgcgtggtggagagtaaagggcagagggagtgggatgggggttcctgggaaaggtatcccaaagtccactcttcagagagaatcagctggccttgtgcttttctttttccttctgaagtctaacctcaactctgctcacagggttcaaacatagcctcttgcagaggtctaactccacccttccctgcctgtctcaggcctgacccctcaggggcgctcagtgtctgtagatgcctggcaccctctgtccttccacctgccccccaccaccacttctccagcctctcctcagcctccatttgacctctggcttgcccatagcttggtccttgcttgtcctcttggcacgggtcatcctagggctttcccaccagtgtgcctttgggggcaggaatggctcccaggggcaccaagacagcaatcccttagctggagtgcctgtgtccaggctgctggcctagggccaagcagccaattctgctgaccctggacttgcctatgggtatattatccctgttgagggtgagggcttctgctgtggaaaagtctgggaagcactgcaggcctctctcggccttggacccttccttcagacccaaggtgcatatatatacatatatataatggtagatcacgaggtcaggagatcaagaccatcctggccacatggtgaaaccccgtctctagtaaaacacaaaaaattagccgggcatgctgccgcgtgcctgtagtcccagctactcgggaggctgaggcaggagaatggtgtgaacccaggaggtggaggttgcagtaagccaagatcacgccactgcattccagcctggcgacagagcaagactccatcttaaaataaacaaatgaacaatatatatatatatgtattttgttttttgagacagagtctcgctctgtcatccaggctggactgcagtggtgcaatcttggctcactgcaacctccgcctcccgggttcaagcgattcccctgcctcagcctcctgaacagctggggttacaggtgcacgccaccacacctggcgaatttttgtatgtttagtggagacggggtttcaccatgttagccaggctggtctcaaacccctgacctcaggtgatctgcccacctcggcctcccaaagtgctgggattacaggcgtgagccaacgcgcccagccccaagtcccttttaccatagaaagtaacatagtcacagtgcccagggattcacaggtatggggagagggttcgttattcagctgccacacccaccttcctaaacctgctgcccttccagtttcctcacgtgcacagccacgcccgtctgcttttagtttctcaatctgttggcttaaccttcaaaacaggcccaggatttgagcacttctcaccattccctctgccccatccccattcatctcttgcctagactgctacagcagcctcttttactggtcccctgcatccacccttgccctctaaggcaagggtccccagtccctgggccaaggaccagtaccagcccctcgcctgctaggaactgggccgcacagcaagagatgagcagcgggtaagtgagcattaccgcctgagctccgcctcctgtcacatcagcagtggcattagattctcataggaggcaaaccctattgtgaactgtgcgtgcgggggatctaggttgcctgctccttatgagaatctaatgcctgatgatctcaggtggaacagtttcatcccaaaaccatccccaccccacccccgacccccagtctatggaaaaattgtcctccacgaaaccagtccctggtaacaaaacggttagggaccgctgctctaaggtacattctccacctggcagaaataatctttacaaaatgtaaatccgattttgacactcccttcttcccactgtgaatagaataaaaccctaccaggcctgcaccgtcagcccctgcccacctctcaacccagtctcctatctctgtctgcaagctggttcccacctcaaggcctctctgctctagaggctacctctccctgcagcgcttttcccctagatctttgaatggctctttccttatcattcacttctacttcaatgtcacctcttcagagaggcctttgctgatggccctacacccagtcacttttttttatctgcttctcatcaaaattgccttgctgattcctttgtttcttattcatcctctcccacatccatcctctcccagcccagaatgttgacttcctgagagagggactgggtctgtcctgctcaccatggtaacctcggcatctagaacagtgcctgccatcacgtggtaggtgctcagtaaatattcttggaactaatgaatgaataattctatccacaagacttcacaatggctcttcatgctgcgatctagctttcaactccaaactggtcttgagatctcacctcagtctctaaccttgacatctaacctcttcacccactctcttacctgaccctaatttttaaaaatgacgtggtcagcttttcagccccctcattccctgtttttaggaggtagtgagtggaagctggaagaataagaaagcttggggagactgcaattgcagtcaggaaagaaaggtactctgccgggaagaacaccccatcttctcctagggaaagattgtggagtcctggggtttgttttgtttttcaattttttgttttaagagacagcgtctcgctctgtcacccaggctggagtgcagtggcgcaatcacagctcactgcaacttcgacctccccggctcaagtgatccccccgcctcagcctcgtgagtagctgggaccacaggcgtgcaccaccacgcccggctaacattttattttttgtggatataaggttgccctatttctttgtggagataaaggctcccctatgttgcccaggctggtctcgaactcctggcttcaagcgatgctttcgcctcggcctccacaaagtgctgggttcacaggtgcgtgagcccgacctgtgtctcgttttgaagctcagggagagggcgctgtgagcaatccctaaaccctttaagagtaaaaagtgcgtgcacctttaagaggacggttagaaaacgcggggcgtggccacaggagaataagttcgcgctgaaccaggagcgtgggataagaccggccccttccggttacgaaaccttagcaagatggcggctccctgggcgtccctgcgcctggtcgcccccatgtggaatgggcgtatcaggggcatccatcgcctgggtgcggcagtggccccagagggcaatcagaagaagaaaaggacaatactccagttcctgaccaactatttctacgatgtggaggctctgagggattacttgctccaaagggagatgtacaaggtgcatgagaaaaatcgatcttacacctggctggagaagcaacatggtccatacggcgcaggtgcctttttcatcctgaagcagggaggcgcagtcaagtttcgagacaaggagtggatcaggccagataagtatggccatttctctcaggagttctggaatttctgtgaagtgcctgtcgaagctgtggatgccggtgactgtgacatcaactacgagggcctggataacctcctccgcctgaaggagctccagtccttgtcgctgcagcgctgctgccacgtggacgactggtgtctcagccgcctctacccactggccgactcgttgcaggagctctcgctggccggttgcccccgcatctccgaacggggcctcgcctgcctccaccacctccagaacctccgcaggctggacatctcggacctccctgccgtgtccaaccctggcctcactcagatattggtggaggagatgctgcccaattgcgaggttgtgggagtcgactgggctgagggcctgaagtcagggccggaggagcagcctcgggacacagccagccctgtccctgcctagcctttagccctgtccccactcacgtggcttctcagcgggctgcatggaatgtctggtagctcaccacacttctggcttccatttgtcttcactcaacgtcagggtgggggagtggtgctggccaatcacaggagagagcgtgagttcccagtatttattcctggctgcccttggctaaaggtcacagctcctgtcaccctgtcaggcagccctttccatgcccctgttcaggcctggggaggtaaaggctcaggctgttagtagccgcagagagccacactcaccttgtcaggagactcttctcaaactgtccttatgtgagtgcactgccatttcttgcagggaccctgactgacacaggggctactactgacactttacagggatggttctcccccgtgcagggccgctgtgcccactgcaggacatgcagcatccttcgccccactccactcactaaaggccagcgcaccccaggccccatagtattgctggttatggatttattgactttatgttccaaattcagctttttcagttggctgttttttgaaaggggataagctttgtcagtagagggcaccgaacaggcattataggaggaaaggcgcctccttcgtggttcttgttggcctccactgaggcacctctctgggaataacgttccccagcaccccaaatggatttccagtcaattcagaagcattttaccagtgaagccctcattattccagttcactgttaaagccagtaattctctatattaaactttccctgttcggtttatggagtataaaccgaacagggtcttgggaagggacagtgtctaagtgtctgggtgccatccagagcatttggcaggggcagctgcaggatgagtgtgttcccaggggagtgagagcagcagctatatggcacttgtttgctactgccctctttttttctttttgccaaacctgaggtgactagtgtcacaggtggagcccatctcaca

SEQ ID NO: 735302 - DNA, 188086 bp, Homo sapiens
ctccaaggctgagggatgaggagacctgctgaggacccagggccttatctttccatcccactccataggtcccagtattgactgatgctgtcttcacctcctagcctcacttttaaccttctggcacccgcccaccactgtccagttcactattgaagccctgccgtccagtgctgcagagggaaaggatgttcttctactggcctgcaatatttcagaaactattcaagcctattattggcacaaggggaaaacggcagaagggagccctctcattgctggttatataacagacattcaagcaaatatcccaggggccgcatacagtggtcgagagacagtataccccaatggatccctgctgttccaaaacatcaccctggaggacgcaggatcctacaccctacgaaccataaatgccagttacgactctgaccaagcaactggccagctccacgtacaccgtgagtgattcccccatacctctgggtgctggcggtcagttctgcttcacacacatgagattgtcaggcctgggctgtgcctgcatccccctctgcattttgtcccgtgttgagatttgggcatttagtgcaggacacacacatggtaggtaaacttcaacagatcagaattcctttcctgcatccaggccctgcagacactgatggcgggggcgggggggcctcagcagggggaggtcagtctcagccaagcaccccatgccctccccatgaacctgaccctgagaaagaccctggagaactgggtcagggcctggcctgagggcgtcctgggaacctcacaaaagcccagcctcaggactcctgactccgtgtgaccccgggaagcctgtgtcagggctggggtgtggtctcctgggcagggcttactgggagcaaggatttaccagatgtctgcgggctgtggttcctgaagcttctcatcagtgagggctcagctcccagagtctcatctagacaaggacagagcctaccactttccctgggactcagcctggagagggcagggggacaggattactagggcattggccccctgaatgaggagcttaagagatgcccttgggcagtcagtggcccaggggtaggaacagaggggagaaaatgttcctggcagcttcttgtccaccggggatcatgcccaggggtgctctcccatggaggcaaataacagatgctgttgatgtgaacacctcctctgtgccaagcttcatgtcagatcctgtgaataatttaaagttcattcacagacaaagtggcaagcctcagaccattttccatttacatattgtatggaggggaaactgaggcacagagagatacagacaccggccacggtgggcagatcgcagctggcagagtcacatgagggctgtctgcagctgctgccacgtcctctccttcatccctggtgccttactaggtgtctgtggaccttagaacagccactggttcggatgttttcttcttaggtgtctacagctcggagggggagattctggtctggagagttatgagtaaatacagaattaatcagttttttcttaactaaatcacctgcctcaacaatcagtcagtgctggggaagttcaggcctcctcgctcaggtccacaccccgcatctctggacatgaaatggcttcgtgtgttttctgatgtgtgggtatcattccaacaggaggataaaggggaggactttgctttctctccccattcacaccctgcaccagccagggcccagtgtgagacacatactccgtagttctctcatgaaggagggagggaatgaatgaaggaatgatctataacctcttcagagacagagacctggatacaagatcctaggaggttctgggcccaacgtgagacacacactctgtagttctcttatgaaggagggagggattgaatgtaggaatgatctataacctcttcagagacagagatgtggatacaagatcctaggaggttctggccacacctgttttctgtccctctagagcctaagacccatgtctcattcatctggcccgtttctcctaaatctgcccctgggagctgagtctcatctgaccctggggctgcagggctgtgggaaggttttcaggggagggatcaggcttgcgggtagtcccacacgtttgccttacaccctggagctctacctggttctcactatgaatatcccataataatcccccctatcctttctggggagtagaaaaaaagtaaatatttaaaaatatgccagagcatctgttcttcttagcaagttcagatagttattagttagcaggaataaatcgttattttaccagagcctcacctgctgggggtttatgggagcctaactgactgaggggggtgggaaatatccaactccagccccctctagccatcatgtcccacctaaaggagagaaaaaactgagaggcacttgtgacattcacagcccagggcacagactctatccaggaccacagaacccctccctccccccactcaccaccgcatcactgaacgcctgctcacccaagttcctgttgcccagtacatcatgtcctggctttcaacaaaaactacaagacagactagaggcaaaaaaaaaaaaaaaaaaaatgcagttcgaaagacagaacaagcatcagaaccagatgcagatgtggcagggatgtggcagggatgttgaaattatcagaccaggaatttaaaacaactctggggccaggagcggtggctcatgcctgtaatcccagcatttgggaggccgaggcaggcagatcacctgaggtcaggagttcgataccagcctggccaacatggcaaaaccccgtctctactaaaaatacaaaaaattaggcaggcatggtggtgggtgcctgtaatcctagatactcggaaggctgaggcaggagaattgcttgaacctgtgaagcggaggttgcggtgagcctagattgtgccactgcactccagcctgggcaacagagcgagattccatctctaaaacaaacaaacaaaaaacaatactggctaatatgctaaaggctgcaatggaaagcatagacaatgtgcagaacagacggatgctgtgagcagagagatggacaggctaagaaagaataacaacagctactatatctatctatctatctatctatctatctatctatctatctatctatctatatatatgtatatatatgctagagatcaaactcactgtaacacctggatctcagagtggttgtgaggatgtttattaggagattaaagagattaaagcagagttatacacagggcgagagctcaactgatgctatcaactagtattcttatttttttgatgttgttattggcaataaaatcaggaacaatgcagtaaaaatttggttttatcatgtacgagttctgtgaccttccttgacttactgaggtactgtaagtctcagattctaactctgcagatggcggtgatgcccctctccctcaaggtgatgtgaggatgagatgagctgtaggtaggttggtgcccactgtgcctggcacatggaaggcccctgaaaatagtcaatgaacatcatccccgctcatcagcatggagttgacagtgagggctcgctctctgtgacaatcatggaatggaaaagaagaaacaagaggaagactgggcgcagtggctcatgcctgtaatcccagcactttgggaggccgaggcgggcagatcatctgaggtcaggagttcaagaccagcctggacaacatggcgaaatttcatctctactaaaaatataaaaattagcctggcatggtggcacaaacctgtaatcccagctacttgggaggctgaggcaagagaatcgcttgaacttgggagatggaggttgcagtgagccgagattgcgtcagtgcactccagtctgggtgacagagcaagactccatccaaaaaaaaaagaaaaagaaaaaagcaacagagggaagaggtgtgacatgagaggaagaagggatttaaaggtacaggagcagggcgaggtgcaagcacctgtgggagaatgtaggagttggtacatcccagtgtgtcaagtctgagacacagaaaatggtgcaaccgtggagagcaagggagtcagctatgaggacagcccaacagaccacactcaggctctggagcatttccttcctccctgactatgcccctgccctgcaatgccccttatggtttcccttggaacaaacttgggccttgtcccctttgccttcccctttctgcagaaaacaacgtcccaggccttcctgtgggggccgtcgctggcatcgtgactggggtcctggttggggtggctctggtggccgccctggtgtgttttctgcttctctccaggactggaaggtaccgcagcttttccccagcctcctcccacccctaggctgaccccagtcagggaggagggagaccccgccctgtattcagggccaggctttccgcatcctcccaaggaatccttccctctcattccatggctcctcccttgccagctgctgatcctaggctgcctcttcctttatgaatgtggcacagttaaggttgcacccctgagtgctgtcctagttccctaacacagcaaagccacagctgcctggagggaggaagggagggagggagggagggagataagacgggagtgctcagaacctggtaccttctgctgttcattgaatttacccacccagtgaggagggatttgcaggcttgagatccatggtgggggtcctgggcatggtcacgcagtggggagtggcaaagcctggacaggctgggtagggtcagcaccccatcgtgattgatgtccctgaggtgtgagatgggagaacctggacctcaggacctgctgtcctttatgtctcttgccaaggggtggagagagagaggacaaggccattgccccatttcagcatctccaggcctgaaaggagggtctggccatggcagggatactgagttctgggagaatatgatacatgctccttgcctccccatgcccccagctcccccagtgtcctgcacacacagccggccctgctttccctctggggccttgacccttcctctcaggcaaacgcaggtggtctgattccctccctgagtcctcagtccctttcctgggtccctgggtcaatgttctcctcacccggcatctgcctgggggggtccttcctctctggccaggacagacgtgactgcttaaggcctatcctcagctccccgtcctcggccgctcctaccacgaaactgatggagacaggaggccttcactccagtccttgaaaatggagtcccttccttgtcctttattctgcccctaaacctgtgatttctccctgcaccctcatgaataatcctgacctttcctagggccagcatccagcgtgacctcagggagcagccgcccccagcctccacccctggtgagtgtcccttcagcccaggtgtgggagcccctaggcctgccctacggtgtccactcctgccagtcaccccctgggggcctctgaccctttctttggggctgcaaggaggatgtcaggaaacatgacacaggggaccccgactgtcttgttcagactgatctgtgggctctgggtcgtgggtcacctcctcgacctcagctgctcaggtctcccctgggaagaggctccctctccctgattctctgggagctgaggacccctacactctcctgcaggaggggcccaggctctcctcccaccctgctgctcactcctgtctctgtccccaggccatggtccctctcacagatccaccttctcggtaagcctgttccctccccagcccttttctactggggtcccaacagtgcaggctcagggcagggggaccatcaaccccacagcacagcactgacccacctttccccagaacagtcaggtcaaagtgagtgcctccagccaggatccgggcctctctacagggccaggaccacccacgccatgtgctgacccctccccgggaccctctacacctgaggagaaccctggagtccagcaggtgcagaatggacactgggaccatcagtcagaggcccacattaacaagggtgcggggtgggcccagccaggacaggggtcagggtgttgtgtccacactgggaggctgagctcaggggcagagctggtcaatcctgaggggaaatgagtggaagtggaggcagggaagtaagtcctggccgatcagagacaggaaccttccaggctgggcttccgtgaccctccctccctgtcccctgacatctcctctctcccctgcccaggcccctctacccagccccagaacagccactcccatctatgaggtgagtgtgggccatggatgttctggtcccgcaggctccaggggacccaggatctgcccccaccagcacctggctgagctcagattcaggaaaatgcagtgaaaatgagaacaggtggtggtgagcagaggagggaggggcctgggaacagggaccccctgagcacagccaggttcagccccagagaagccctgggtgggcccagagcctgggagatgccagacactgttctgagaaggctacaggggttgaggcctcttctctgtttttacaggaattgctatactctgatgcaaacatttactgccagatcgaccacaaagcagatgtggtctcttaggttcctctgggagctgctcttgtgggttgatggagcgtccccaaagctcccagccctggggacggggaaggacatggagcctgagccagagaaccagctctgagtcctgaggagacacaggcctggggacagggagggatgggagtccctgctgaatatctggagaccctgacaggttgccctgggctctgggtgggccgggacaaaggcctctcatcaccacaggaagcgggggcttgcaaggaaagtgaatgggcctgtggcccacccggggtcaccaggaaaggatctgaataaagaggacccttcctctcattggctctttttctgctcacgggaacttagcagaaactcacctgaaactccgtgtccattctctcccgggtcacacagggaaaatatctccaccttgtctcaaccacagtctctcttccctgggaggcagaaataggggttgggagtcaggctggggtgggccctacacaggaaagggcaagattcacatgagccctgcccagccagccgagcgctcagctgtcctcacactaccccagggaccaaggccatgcacagccccagcctgggtccctctgtgaatgcatgtggggtctcaggagcacagaagatggggccatctgatgtccacaaaaggtgagcaatgcgggagcaaccatgggtggtataggttgcggctgtggcccctacgcagcctccagtgtcctgacccctgctgccctcttcacccaggccctggaggcccagtctatcactgtcctccacaaatgaacttacctgtccccaaatccaggatcctgtgtgcttatacctggccactaggttctcctctgtcccagtggctactgctcaggacatctttatccctggtggggcacagagaggggctgtcagagcaaccaagattaatacagacgcataattcagtccttgagcactacccaggactctggcccctcattgctcatcagttcccactttaccccctggcatggatctcactgagcaagccaactctttacacaggagcatccaggtcagaggtgcaggactcccccatctaaagctcatgcaggctcccatggcgatgggacaacctgtctgctcctctccctggcccacagccctatctcgcctgcagctcctccacacacctgggacagcagttctcagcccttccctgagggcccctggaagggtgatgatctcatataggttcacttgaaccaggtgccaccttcccacaagtgagctggtgcctgcactaaagcacagagccacagttcccaagagtgttctgccactgccacaggtcccaagagtgttctgccactgccacaggttgttcgtcctgagatgagaggtaagaaaacaacccgcaatgggttgttttatatcgggatttgcatcaggatttagctctaaatgacccctgatcccacctgcacacagcgtcagatgagacaaggtgaggcctctttagttttctgttgaggctgtgacaaattaccacaagcttagtgacatagaaacctgaaccaaagtgcccacatggctgtgttctttctagaggctccagggaagagtgcatttcctctccttttccacctcctagaggcctcctgcaaccttggctgtgtcctctttctccatcttcaaagccagcagcacagcatcttgaaactattctgtgccctgcttccatccccacatctccacctcctcccacctccctctctcacttaaaaggaaggagccttgtggttattttggacgcacctgggataaaccacaacaacctccccatctcatgatccttcctttaatctgtaaagtgtcctttaccacgtgacatgtccacagatctggggatgaggatgtacacatctttgagaggcccttgttctgtccatcactcctctcaaggccatcttctcatcatcgttcactacaaactacacatgggcacctggatgggttcatcatgactgtggcgtcagttcctgcattaacatccccagcaccctccagatcctgagagagggagacggagggctctccatgcccctagtacctctccaccttcttcttggtgacatgcttagttgctaagaataacagaaagcggaggtgactgaaagatcacaactcaccggcccttcaatagttcgtggacatcagcaccacggacagtgactcagtgaggctaatttccaggtggcagcagggagcatgcagataggagggaactgcaggaaaagctgcccattctattctatatgagaaagagtgtaagaaagaggaagctattacagggataatgctattcttctctaatccataaattgcgaaacctttgcatgtctggatatcatggtttttagcacatctgctgccactccctgcagggctgattgctgcatccaggatgtggtctcttggggggctcacagcctgctttggcctcatggtgagtctccctgcccctgacactcaggccactgtctctgcctacaacatggtgggaaccttccatgattaacgtctgattctctgtgcctgacctttgaagcacatccatcactcagcctggagcatccgctgagctcagcatcctgctcctccatccccagctgagcccttgaggagatgcttgagaggatctcctgggctcctctgtgagctcctccaggctgagccttgtgcttggtgtcagaggcctttgccatctgcttgttctttccataggcaaataatcctcctcagggacaagtggggcctgaagatctgtctgaatatctatctatctatctatctatctatctatctatctatctatctatcatctatctatatgtatgtatatatgagaatgctttattaggcaaaactgcatactatgaacatgctttaaaatgcaacaggatgagatgtgaagacataaagaacaagtgtgtagtgacacatggctatcagaacacactgaagaatccacaccgcggccgagagcagtggctcacgcctgtagtcccagcacttttggaggctgaggcaggcagatcacttgaggacaggtgttcgagaccagcctgaccaacatggtgaaaccccatctctactaaaaatacaaaaaatttagccgggcctggtggctcatgcctgtagtcctggctgttcgggaggctgaggcaggagaattgcctgaacctgggagacacaagttgcagtgagctgagatcgcaccactgcactccagcctgggagatagagtgaggctccatctaaaaacaaaacaaaacaaaaagaatccacactgcttccccgcttcactttacccagaaaaggaatgttctaggccacttcctcttcagcacacatccccagggaactaaaataggttcacagtcacccccatcttcctcattcccatcacctcttacccacagaggcatctctggtcctacagatccagccctgccttcaagaggcacaggtccaacccatccagtgtccctgctagtcacacacagcactcagggtacaatggagggcttctgtgctttggatgggaacaaaccccacctcacattcccacacctgagaagccaccagggtcctctctgtcctgtcctcacactcaatgtctgtcctgggtcacccttgtcatctctcctggaaataggcatggctcctgacaggtaggattgaggctttgtcttttcaggagtccctcccactctgagcacatgaaactgctcagctccatgcaaccctctctcaccaggggccttgttctctgggtccctgaatacctgggtccatgccatgtacattttaagaaaaatgacagtgactctcaccctgacatcctcacccaaggcacgtgtctgacaagaatcaccaggtgagatacctgtggctccacacacctgaggcttcactgcgcaggggtgtcctcatccctctcctcccacccctagggacagtaagcaccacaggctgccttggaccaccagctccccctcccagacacagcctcagatctatactgacatgctacatggagaggctctgatgaacagcaggtattaggaaatcccaccgaaccaggtgccacttgcggccccactcctcctcatatctgtgactgggacagacacacataacacacctctgttcaccgcccagcccccaaggtcaatcacagtctgcttctcccctagatccactgctccccatgtcttccgtcctcagctgcatcctgggtggcctccttgctgttcttgtaccccagaggcaggttccaacctttgtgatgttgcctgcaatgcccaaactttcccttccccttccccttcccttttcccctcccccttcccctccccttcccctccccacccctatcccttcgtcttcccttgtcttcccttcccttccctataaagccaaacatacccatccacctaccttgtggtcaaagtcatcagcctcctgctccactcagtgttctctgaccctgcatatggaggtggtggcccctcctagaacacccaccactcactgtcagccttgcgtggtaatcacagattttgcaggggttacctgtgttcaggtgtgtcacctgtggaaccagaactcttggaaggactggcagagggagctgcttaggatatctcagggctcctggcatctggtctaccacagggctattaacaacagcacttagggacaaggtggaggatggacggttaagagggtaaatatggatgatgtgtgggcaaagaataggacacaggaacacatgcagtactcaaataattatgccaagaaaggtgaggacatggagatggacattcccatatacttctgatgggactgcagtttagtccctacagcaacattgacctcatcatgtttaacgcgcacacgctctgaccactatcctacttctgaaggcctccctgtgctgtgagctctgagaaggccaagcttgcctgttctgtctctgctaaagccagagaccagccaatagcccagcacagggtacttcataaatacatgttgaaggaatgagctccaggaacagtactccacatggtagagatgtgtgtatgaggatgttcactgcagaaggtcatgtcaatgtgacaagtgacgagcagcctcaaatccagcaacaggggtgtgggtaaaagatcatagtgtagccatgcaatggaaccaatgaaaaaaccacaattagagcaaatccacatgtattaataaaggaggtgccctccatacatgctgcacctaacagaatgttgccaaataagaatgaaaaatgatgatatttgggctgtaaaaactagaagtcagctaaataagaatgcatcgaaagtatttgtgaatgcttacaattttataatgccttggcatccgttttggatggaagttggactttctcataccagaagcagggctcagtcacctttgaaatagtttccagttctccacctccttccagttcctcagtgtgattgatcagatatctgatttatacaactgcctcctggtgacctcctccctatgggacttccggatacagcccgtatgactgccccactgaccccacaccctgcctgctgcagtgaccacctctaattacctggatctcatgtctgcttgcattaaatccaccaattaaaactccctgaggacaatctgtttgaataatattctgtaccctaataaaggccttgacccatgggttccccctctgtcctccccatactgcccctgacctctgtgtgtgtgtgtgggtgtgggtgtatgtgtgtgtgtgtgtgtgtgtcctccagacagggcctgtatcccccaggacctgtaagtaataaatctttattttcatcttatgtctctcgcaatcattggcaagagctctgcatcttaaagatcgcaaatttaagaaattggtgtagtcggcacaatagagtacctcttctgtttagcacaagatatctcggagctgctgaggcttttaacatcctcgccggtgtggctgcctcactggtgaggccgttctgttcagtgcaattcagttgctccactgtgtgctgctgtgttgctgctgtagagtgctgccatgttgttctccccaaattgttaccgagtaggaacctgtaatgtgctcccaaggtggtctaccccatgagaagggggattctccatctagggcaagggctaggtgtgtttctggaatcctaatagggaaggcatccacagagggtgaactccactcctccttagagtgaggagtgacatttcccatttattttccccatggaggtgccatgtattgactttttctttcactgtcccaaggttgagccaaggtgagctatggagaccagggcaagataccatttctgttagcaaagcaaatgggtgacaacgtgtggagaagctgtggttctcctgatggatatagcagagtgccatttagtaaaatcttgtcaggaggctgcccctggttagaccggcagtgtctgtagtcactaaggtggatgcgaattttaggccctgggccatggataatccctgcagacacagccgtggcttcatgtgatggggcaatcccgggctagtggctcccttgtttctgcatttcttgctgtggttgcacaatcaacacctcaggggttgattgggtcaccttggaaagagaaacagctgcctaggaggctggtgcacatggaggccaccctcaattttattctgctaacaagttgtaagattaaaacaacagggggctttgggtaccatcaggaacttgtcaagtaaacatccaaagacagaaagaagaaaaagaaaaagacattaaccgtctagaaatacaagccattttaaagattttgcttaaaagatgcgcttgggctgggagcggtggctcacacctgtaatcccagcactttgggaggccaaggtgggtggatcgactgaggtcaggagttcaagaccagcctgaccaacatggtgaaacctcgcctctactaaaaatacaaaaaattagcagggcatggtggcaggtgcctgtaatcccagctacttgggtggagaatcgcttgaacccgggaggcagagacggcagtgagccaagatcgcaccactgtactccagtctgggcgacagagtgagacttcatctcaaaaaaaaaaaaaaaaaaaaaaaaaagacgggcttgtttcgtcgttgtggagtcatcccagagagaggctactccctagagtcactgaccacctttcctcctccatcttttcctcttatcattctagagacagaaaacaagaatctcagctttaggtggctaacctcaccccccaagaaaagaaactaccactttgattgactacaaatccaagaaaaataaaagagaaactttaaaaagtactgagcaaaccacaggtctagcaaacataatgctagccctaggttacttattcatttacaacaaacccctagatataggaggaaaaaataaaaggtaattaaatatatacacatacaatattttaatataaatatataataaatagttaaattatgtatgtataatatgtaactaaatcaaagtaaaatttcatactttgattctattggaaattcaaaattcatttattaacttatatattaaggaatttatgtaaaaaaagatttttaaaagggcaccaatttgcttttgtgtctctacaacataggatctaatttaactttacatttgctaaatacactaattgacaaatattcatggatttaatcaatactggggctcaaattgtagccacacgtgggaatcccataaatttaaacactctgtccctattatcttgagaagaaaactaaatataaaattgaaaaaaacaggtatgtctcaatttacctgtaactttgcctaaatttcccggagtcatatacccattgctgtaaaacattctctattggacataggtgctctgagacaataaataaaatagaagtgtttttggtacttagacattggcttgacaaaatgggatcccatgaaacctcagttaagatagtgaatacggcccaatgtgagttgaaatggggcctttaaggattaaaacttattacatgaaacctagtaagtaatggggtgattatccatactgcttctccatttcatagcccaattttgacagttgtcaaatctggaaaaaacaaacaaacaaacaaaaaaacccctgggaatctgttgcctcacagagacacaaagtagacatcaaaattgtatatctcagttccagttccaaaatggtggcatagaagcaagctggctttactccttcacacagaaaaccaaaaacaaatatacagcaccaaaattattaccagatatattccagaactcaaatatgaaaatgaaacagttttcagagccacagagaagtgaaaaaaactcccgacagatgacaaaagaatcagatttccccatctgtaatgtccctccctgccccattctgcctggtaccaggtgtgtggaaaattttaccccaactcatggtttctacactgggaaatgtaagatcaatgcgggcaaccagtttctgcacaatcctgggttccctgtccctgccttaacccacaagaagcattgtgagtgcccgaagggagaaatttccctgaggacagtcaaagagtggggaggcaggactaccatctccttccctggaaactctgctgtgtaactcagccaagggagacatgaaatcagactggtgtttcagcagctccatgttgtagtaggtttgtttcacaggtatcctgggcatggacatctagccagctttcccacactgccaggatatcccctttgggacctccctcagttaggaagggcacactctgatcatttactagggccaaggtaaaccctaaaggtaacttagagatgaaaaggaggtagtgacctagcagtaaagaactctaagaaaatctatccaataaaaatcaaaacaagccagacaaagactaaaataaataatgaatccttcaatgtaaagacctggacttacatccacaagaaacagtaagcaggtaaccatgatctccccacatggacaaagtgaggaacaagtgactgatcctgatgagatggtgatgtgtgagctctctaatcaagaattcaaaactgcagttttaaggaaactcaatgatcttcaagaaaacatggaaaagcagttcagaaatttatcagagaaatttaacgaagggattgaaataatttaaagaaaacaaacaggaatcttggaattgagaaatatatttgctgaacaggaaaatttattagagtctctcaacagcagaatggatcagaggaaagaatcaacccaaataagactcccccaaggcataaaataatcgaattctcaaaagtcaagggcaaagagaagattttaaaacagaaagagaaaagaagcaaatggcataaagaagctccaattctgtggcaacagattttcagtggaaatcatacagaccaggagggagtgacatgacattctcaaaatgctgaaaaaatattgacatttgagaatactttatccagtgaagttatccttcaatataaaggagagagaaagtttcctagacaaacaaaagctgagataattcacaccatcagactagtcttcctgtaaatactaaagggtaaatactaaatacttcaatgtgaaagtaaaaaaaaaaacactaacatgcaaaacaaccacaacaacaataacaacatttgaaggtataaaatccactggtgaaattaagtacgtagacaaacccagaatactcaaatagtaattgtggaaagtaatccaatcataactctagcatgagtctcaaaatataaatctatcaaaaacaataatacattttaggaggccaaggttggcagattccttgaggtcaagagttcaagaccagcctggtcaaaatggtgaaaccccatctctaccaaaaaatacaaaaatttgcagggtatggtagcacatgcctgtcgtttcagctatttgggaggctgaggcaggagaattgcttgaacccaggaggtggaggttgcagtgagctgagattgcactactgcactccagcctgggtgacagagggagactctgtcttaaaaaaaaatagctacctgtttggagaaaggtaatataaaatatgtaaatagagacaaagtcaaaatttgcaaaggatgaaattaaagagtagagtttttttggggggttttctgtttctattattttatttgtgatctaagataagttgttaccttttcttctcttgaagatactttgttatatctatgtttttggaagtcttatggtaactgcaacgcaaaaaatctatgatagatccactgaaaataaaaaacaatgacttaaaacatactaccagagacaatcaaccacaaggaagacagtaaaaaatgaagaaaggaagaggggagttacaaaacaaccagaaaacaggcaacaaagtggcagtagtaagttcttacttaaaaatattgaacactgaatataaatggactctattctccaattaaaaggcatagagtggctgaatgctgcctatatgctgcctacaagaaaccacttcatgtaaaaagatacaaatagactgaaagtgaagggggtggaaaaagatatttcatgcaagtggaaaccaaaagagagcaggagtagctatactgatatgagataaactacaaatcaaagactataaaaagagacaaagaaagtcactatgtaatgataaagcgctcagttcagcaagaggagatgccaattataaatatctatgcatccaacacttgagctcccaagtctcccaagtatttaaagcaaacaatagtggatctaaaaggagagatagactgaatacaatattaattaggggactttaacaccctgctctcagcaatggccagatctttcagacagaaaatcaacaaggaaacttcaaagttaaactacacactagatcaaataggcctaactggcatttacgggacatttcactaactatctaactgttacagaattcacattattttcatcagcacatagaacattcttcagaacagaccacatcttaagtcccaaaaccagtcagaataaattcaaaaaagtttatatcacatcaagcatttgttctgaccacaatggaataaaactacaataaatgaataactttctggacacatacaacctaccaagatggaagcatgaaaaggcagaaaaacccaacaaaccaacatgaaactgtaacaaaaggaaaacccaggaccgaatgacttcactgctgaattctaccaaacatttaataagaactaaaaccaattctactcaaaatgctttaaaaaattgaagaggatggaacactttcaaactcattctacaaggtcagcattatcctgataccaaaaccagacaaggacaggacaaaaacaaacaaacaaacaaacaaacaaacaaacaaaaaaacactacaggattgcttgaggccaggagtttgagatcagcctgggcaacatagtcagaaccaatctcttaaaaaaaaaaaaaaagaaaaaaattagccaggcatggtggcatgtgcctttagtcctagctactcgggaggctgaggtgagaggaccaattgagcccaggaggttgaggccgcagtgagccatgtttgtgtcactgtactccagcctggggaacagagcaagatgctctctcaaaaacaaaaagcaagctgggtgtggtggctcctgcctgtaatcacagcactttggaaggctgaggtgggagaactgcttaagcccaggagttcaagaccagtctggacaacatagggggactccatctctcaaaaacaaccaaccaaaacaaagccaaaaaagaacataggccaacatcactaacaaacatagatgtaaaagtcctcaataaaatattaacaaaccatgtttagaaacacatcaaaagagatcattcactatgattaagtgagattcatcccagggatgccagtatggctcaacatatgcaaatcaataaatgtgatccatcacattaaagagaaccaagaacaaaaaccatataatcactccagcaagtgcagaaaaggcatttaataaaagaatgggttgagggagtggagcccatagtcagagcagcagtggtctgggattttggaagtagaaagaagggcagcaccactggccaggaccaccagggaacacccccataggccctgggtgttgtgctccagggagggttccctctggagttattaatcttggtgtccactttgcccagctgcccctcacagggtcagggaggatgaagggaaagcttccttctaatgaaagttcagggactcacagttcctagagcctgtagggagaggaagatcttcgaggaagagcacctgggcattggggcgtttgagaggaagatctatgccaggtccaagtggacaacctgtggactctctctccagggacatacgggtatctgggaatctcctgtagcttaaagaggtaaagacctctccctttagcctgaggactggaggatgctggttcaggtgaatgagtcctgcaggggctggtacaggcctggagggtggtggtgtccagggccttgggttcacccttagcatgattcaggccgggcggtgtttcacatgagcaagagggcctgggttcattgcttcaggacaatggtgaaatctcatggtggaagaaatcttgtccttgccagtgcccagctttcatttggtcttggcccagagtgtcctccctagagaagactcttgtcccttcttcacactgcccttcagggatatgccagccttatgggataagatggggtggagactgtagatgtgggtgggaatctctccacagagtgctccttctctcagcggttgcaccttgtctcagggcttcagcttgaaatctgggatctccaagcccttccctccccagtcctggccaggaccacatgggcagatgcattgtgtgaagtgcatttcatttggggtgtcctctctgcatggcaccctcccgttgattctctttgcgcatgtcagagtgcaggcaccatccacacctcctgctggaggagggacggagctgttgactcctgagagctgatcatgtgttcccaccctcacacacaatcatggtccatcctctgagggacatgtgttgccaccactgtggagatggtgcaactgacagtaacaaacagtaaaatctggtactgaatgggaccttaagccaacaatgacaatgtcattccaaggtgtttcatttttattgattcaatgcaagtcacctgatttcattgactattcacaatagctcgataaagtaaatgcatcatcaccaccactttaaagaggaaaaaggtgcttgggcagtttgtgactactgtggtggctgctgcattgctctctggtaaagccaagtaggtggtgggtgcggcctctgggctgggatgatccaccctcctggtggtggcaggggagccaagctggagccatggcctgtgcagtggtagcagctgaactgaccgctgctgcaggatttgcaagctgttacattttgcgaagccatgaagcacataaaacctcaagtagaacaagtgtttcaaagtctaccaaaatctgccttcagagattattactacagaggtggatatgaacccaaaatgacaaaacgggaagcagcattaatactagataatgaatgaacactagtaatagtagggtaagccctactgccaataaagaaaaaaataagagatgctcattaacatgttatgctcttaaatcacgcagacaaaagagggtctccttatatagtagccacaatcaatgaagctaaagatttactgcaagatcaagctaaaaacagtaggtgtataatgaatttttaacttcatattagtttatgtatatgaatatcaagtttttataataaaatgcctccaaacaaagaatatttgatttagggtttaataacttctaagaggggactcagatgtttcctgtttcacagtcagtctgagagggtcatttttcctggagctgacctgggtggaggcctcacactgatactccccagcatcctctctcctgatggggtttatgctgagcatacagtggccctgggacagctccattctctccatgagtcacagacgctggtcatggaagatccactggataaggttccagagtcatctgtggggcaggtcaggatcacaacatccttttcttctgtgactctggtgttgctgactcagatggggtcggagccactgaccctgtggacaatcagtggaggtgctcaactgaaagtgggctgagggcacgtcttctcctccatccctgggtccttaaggtaactgtggaccccagaccaactgacacaggagctagaaagaaattatttaggaagttagtgagggtaagagcgtccttggcaaggtttcccctttaacaaaaagcagcccaagataattccttttctaacaaagagcagcctgaaaaattgagctacagatgtagatgagcaagatggaagcttgcacaggtgaattccagtaggtgtgccaatagaaaagggctgcctggaagccaggtatgttcaacatggagactccatcctcccttttctccattaccacatgtacagtaaaaaaccaggcaacatggcaccggccaggtagacaatccatctgcatgacaaaagatcagagtggggcagccagcaaatggcacagctggtctaaacaatctttcaccccctgtataaatcagacactgcctcctgaagctcatctataaaaccttctgcatttcactatggaagtggcaacccattttccccaggacccctctctctgtgcagagagctcttctctttctttcccctatgaaacttccactcttaacttcactctgggtgcctgcatcctagttttccatggccatgggacaatgaacctcgagtattaccccagatgaatgatgctgtttcacaatcactggttcagctcccttcttcttagggtttcacagctcggtggggagaataccacgcctcagtggtctggggagtgaggaacaaatgaagaattaatcagattttacttagaacgctatcacctgcctcaaccatcagatccatgttgggaatgtccaggcctcctctcttagatctatacccacttcactggacctgaaatcctgtgtttcccgatgtgttggtgtcactcctatgagaggataaaggagagaactttgctttctctccccactcacaccctgcacaagacagggcccaatatgagacacacactcgctcagtagttctctcatgaaggagggagggagtgacctcgagtgattctgccatctgtagtctgtgtaccctggccagtggctgtatcttcatatgcctcagtttcccctcagtaaaataggacacacaatgagaactaaaaataaaattctaattccccagtgaactgaaaggatggcctcttggccaagcggatcccagagttcctgatcatgacaggatgggaggttacacctcattacagcccctccctttggaagtttagaggtgacaactgactagcattaacgctaaaatcgagatcatgagactgacagaacagactctctgtggccataagataccaaattataaactcaacctaaggtcatgcaggcaagggctaagccacactttcctacatttaaagaataagctatgttctaacacagaattttctttctctctagcggctaaagtaacactagccttcgagataagcaatattgaaatgatcgcggctcatccaccaacactggctaactgacccctgttccaacagccacaactacacttcaattggacaggagactgatttcagtaactttctcctaataagagaccactgagcatggcctggttctgctggtatacagacacggtgcactgagtaccataatgcttgtttcatcttttgatgtataagacctaatttaatacatttaaatctgaattctccaccccaaagtgaacatggggtgcatgtagcatgcatgtttgttgatcacgcatgtgcgtgtacttcctttgtgagtatccatagctccacctataacctgttgaatatgtatacctggccaactcattcagcataaatctatcttccacattcccctcccttgaagtgcctgctattggtctctgctggaggctgcatcttctaccctggggaatggccagcctgcaggctgtaaccctgtgtaagaaataacctggttgggtgcagtggctcacacctgtaatcccagtggtttgggaggttgaagtggtagaatagtttgagctcaggagccagagactagcctgggcagcatagcaagatcctgtctcttaaaaaaattttagggaggagagtgaggatcagaaaaaatacctattggctattatgcttagtacttggatcatgaaataatctgtataccaaacccctgattacatatataacaaacctgcatgcgtatctttgaacctaagataaaagtttgttttaaaaactatctgggtgcagtggtgcatgcctatagttccagctactcgagactgaggtgtgaggagtgcttgagctcgggggattgaggctgcagtgaattatggtcccacctgtgagtagccacttcactcaaacctgggagacagagcaagaaccggtctctaaaaaaaaataaaaatagaaaaataaaatgaaaaatatatgaaataaagtctcctttccaaacgtacagatctccgatttttctgccaacaatgataaatggtcagtggcttgccatgttgtctgtgaattacttttaaaatattcacgatcacctgacctaaaggttggtaccaaggaaccgcctgaatacaccgtctctgattatttgcctccaacagagtgttccctgggcctgatctctggtggacaatgagctgctgggaacatcctctcttctctattcctcccctggggatgctgaccttcccttggagtctcctaagttccccagggcagtcggctaatgtcctagggagcttacctgtcttctccataccaagtctcatgtgaaggacgaggctttgcccttgcccagatgaggctctgggggctgagccctggctggctaccagctgcaagagccatggcccttggacagctggtaaatccttgttcccagtcagccctgcccaagatgcctcaacccagccccggcacaggcttcccagggtcacatggagtcaggatcctgggacaggggactggacaggggtttccagggctgagtttctgaacaggggcttcccaggggtcccctcactccaggatctgacatggtcctacaaggaacgtccatggggaggggacccaggagggggaactgacactgacctccccttactgagcctccccccaaccccatcagactgtccttcctctgtagcaagtgcctgcagggtctggatgcaggaaagaaattctgatctgtggaagtttgtctcccctgtgtgtgtcttgcactaaatgtccaaacccccaaatgggatgtaatgtagagggggacacaggcacagcccaggcctgaaaatcctgtgtgtgtgaagcagaactgacccccaacacccagagctcatgagacatcactgtgtacgtgaaactggccagttacttcttcattcacaagatctgtttttatgacttgtagggtgtaggatcctgtgtcattgttggtgacattctgtatcagcagacatgtattggggtatattgtctctcagcctctgtggcaggtcctggggtaattacttgagttcctagtacatatcctgtaattcccctttgtaccagttgtagccaagcctaaggcagattgtgggtgagtggaagaatctccttgccttctgcagcttcaacagtgacttgggcagtggtaggcaagttccagaaagttaaaagtgaggctaggagtggggagagagcatcagttaatactgggccctatgcattgaggtggaaagatggggccctaggtcctggacaggtctcttcatccctcagccttggagtgtgtgtgtgtgtgtgtgtgtgtgtgtgtgtgtgtgtgtgcgcgcgcgcgcgtgcgtgcgtgtcctactgggccaaggtcagcagcatgacctcccttccttcagtgcctctgaccttggcatttccctgtttggagtccttttccccaggggtctgcctggctccctccctactgccttcaggtcctgctcacattagggcatccttgggagaccccttccctgacacctctagagaccctgggtcttccctttctgacctttcgctgctgtgttccctccagggctcttgtcaatacttgacctcacattctagatacccttgcatgtctgtcttcctccctatgagagcatgagctctgtgagaacagggacttgtgtgatcttggttgcaccccagtgcctgggacaggctgcggactcctgtggatgagctcatgagtgttcccagggcccttcacaacgtgggatttattttccaatggctgaggttgttggctaagagctctgttggagttcaatcaggctggtgggaaaaatattagagatagttatagagatagacacaaatcttcttggaagaccaaaaagtttgcataactttggtaatagatctgactgaaggtggtccctttacctttagttaaacaaattaaagtagtaacaaaggaaggcagagtagtttgtctagccagcttgtttactcatgtgatcttaagactaaccattgatgtgccacaggtgcttaattgctttctacttgggaagtccacaatgtcaattaccctctaacggtgttgactcaagcctttgttaattaatcttactgaataaatatgagtctcactagctgatcaaggccatggtcacaactgtttataggactcagcagggagtctgtaagcggccctgacagactcagctggactggcaaagcaaaatatgtgtgtgtcagtgtacactattcacccgtcccccacagctggtgcccctatatgaggagtgctgccacagagctctgtttagtgtcccttgttttttttcttgagtattaccccaacttaaattgtgattattgtcatctgttttcaacattaactgctcagtgatgattcacttggaaaacattaacaatcgagattgtttcttcactaacaacctcagattatttagattttcctgttgtaatcccttcttcctgtttagtgtccaacagaagccctctgtccctctcaggtccccgttctctccaagaaaccccagccagtctctgtgctccctcctcccatccactcccagggagccctcccctcacctgtgagcagaagcgcctgccagggatgtgcactctgtgaggaggggctgagggaggccccatgggctctgctgtctgctttgtcctcctctgtggagaggagcttgggcttcagaaaataaggaggccagaaagtaaggaacaggctgagaaataatggggatgtgtcgaaaggtcacagatgccaacatctttgtcctatgcaatattatccataaaattacaggtttgagatatgcttaaattttcttctaacatgcattaaaataaacatataacttttaatagttatattaaattgtatttaatataaattaaatgctcttgtcagagctactgtgactgtcagctctgctgtccttcctctctctgtgctaagcctcctcccagggcagaagcacttcccagggccaggggtgggggcggggaaaggtaagtggcaatgaggatctgcacaggtagcctttccgcctcctcccctctcagtcctgcctccttgtcttcttttcctctttttctccaatctacatttcagttccttagaccacgctgtgagaagcaaggcttattgggacccccatcccttaacaggatgacctgtgctccccataagtgacctctgctgtgtctagggattggctctgtcagcacctcacagagagtccctggggcccccaaactcagtgttattttctctatgacacagaaacccctctgggtatgcaaggttttcctcatgttttctaatgtctgggaaggttggatttactcccagcagggaggtcacagagatgtccagggagtggggtcctagaaatggacaaatctagagctaaagcccaggtctacgattttcagttgtttttttctgcagtgctatgtgaccctaatttcctaggagtaactaaaatgcaaacctcagacatttgtagacattttatgatttttctctacagcttgtaccactgttattattatttgctttatgctttttcctaaataaatttactttacaaaacatccttgtcctagtagggtgcaggggctcacgtctgtgatctcagctgcttgagaggttgaggtgggtggattgcttgaggacgggaatttgagacaaaacatctttgtcctatgcaatattatccataaaattacaggtttgagatatgcttaaattttcttctaacatgtattaaaataaacatataacttttaatcatcatattaaattgtatttaatataaatttatatacaatacatttttatataataaattatatatataaatgtatatataatagtttttcttttttgagatggagtctggctctgtctcccaggctggagtgcagtggcacgatctcagctcactgcagcctccgccttctgggttcaaacgattctcctacctcagcctcccgagtagctgggattacaggcgcctgccgccacgcccagctaatttttgtacttttttagtagagatggggtttcgccatgttggccaggctggtctcaaacacctgacttcaggtgatatgccgcctcggcctcccaaagtgctgggattacaggcatgagccaccatgcctggcctatatattttatataattatataaagttttctataataaattttatataataatatataaaatggatatttatttaagataaagttattagttttatatatttacatatatttaggaataaatgtgttactgtgggagcccagtgcccaggcaggtagtcagtacatgatggttgtcattagggttaatactttggaattctggattttttcccaagagagtgtctacgctggaatattgggcttgtggctttctgctgatgtgcatgtgtgaagaagctacttccacttattaggacttgtgtatctgtctcgcagtttcactacctattttctcgtgatgttggtcaagtcgcctaacttttctgtgcctcatttacctaatttgtagaatatgggtaacagtacacaagtgtgagtgtgtatttcccaggactgaccactagagggcgtgaaggcaccggcacttactattacagcaatgggtgtagtagtgctcatggtcgtaaacatcattctcccatgaaaggaaccagggcttcctgggagaaataactgattccagggctggggccggaaagcacaagcggagcctggagcatctcgtgaggccagaaagtaaggagccggctgaaaaataatggagatctgtcgaaaggtcacagatgccaaccagaaggagctttgaatgaccaattttgagacaaaatgagcactataagaaataatgatagtaataaattccaacccataaatacccatgagttcctactaatataaataaataattgaatacataaatatataaggatgaagaaacagctttttcttacagcagaattccaattaatgaatgtagaaggaatgatcaaatagaaaatcactatttggctaacagcacagtcaattgtttgtaggcaagaattatcaatggactttaaatatgaatgggtaaaagtatgatgatgctacaactagtgagtaccaagggggaaaaaaaagtacgttgagaagaaacaggctacttccatattcccaaagtatcacttcaggagctacttattgattataatgggacaaatagtaacttacagtagagaaacctggcaacagagtctctccgaggtacaaaggctctcttcaggaaggaggtaaggggaaggaagaagaaaacactgtcctgcctcaattatttgctttccccattctcaagtgtacttcatagacattcaaagatatgtgttgatagtgtccacgatccacatggctctattatagtcatttattcacacatacattcagtgaggctttgagtgcctaatgtgtgcctgatatttgctagatggtggatgctgagaagatcaggtgtgctgctgtctctagggtgactgaatccacctgccccactttacagatgtggaaattaaagtgaaaaggatttataggattagttcactgtcacaaggtcactagccttaaagttacaggagtaaagcaagtttcctgacttgctagattttctgctgcaggtgctgacaatggtgagctccaataggagagaggacactcagagtgaagtgggagccctgaacaccctggattagccaagaggacatgccgggtccagctgtgaccgcacaaaggaccattggggatatttgtattctctttttcacttagagcttgaaatgaggaaaactaagtgcagaaaaccaagagtggaagatttttcacaaagcactggtaacatgcatcagaaaaccctgtgctgatgtctgtcacggtgtttctcactgaacggtaatagtctggctttgagtgtgttccctctacagcctggagttctgcgaggcagggaccaggtgtgattcatctttgtctctccagtgacagtacacagcaggctctgataaatatttcttacaaaataaaatggaataaaaagtagacatctgcacaggtgtgggatgactgagcagcagcagaagcaggaaaagtcagcgtccccagatcagctgatgtggtgttcggattctagataggggtgaggtgccaggatggggatgggggtcctgtggctctgctgccctgggggacacccctaggtttcacagtgcctgctgtggttgctgcactttgcttccccatgggaaagtgatcagagggtgtggggcttcaggtgaccccatgtgggaaatggccaagggaaggtggggtgggcggcacatggttttttttaaccaatatttgaaggtaggttgtatgaaaaggtgttaggcttatttcagcttatggggagtaggacagggattggtgagtgtgtatcaggtatattttggctcaggatggaaaagaactgtcacagtaacataaggtcttttgggaaattacatgtttactggcagagttcaggccagggctgggtgtctgaaaatacctgtcagggtcacttttatggttacaagggcagagcttggcttggaaccaggtttcttactaataccacatattaagtattataaaaactgtcctttgcaataggacattgctctatgatgcaggttgaggtccctctgtttaagtaattgtgggtggctgtgattctctcatctagtctgcgacttggacttcacctccatctgcagtccctctcctttgctgttgacactggtcagagttaagcgcatttactgacgatggtcacagggtggcagcactgcctctctggtattttctaaaacctcttcctggaactgagccagtctaagaggatgtcatgactaagaaaagggcactaatgaggtgaacagataattttttttttcttgtttctcctgtgaagtaacagagtggaggtgagcatggaataattgccttttagaaatggaagacaatggagagaagtgtttcgcaaaccttaatgtgttcacagatcccacacagatctttttattcaatacagattctgatttttctggtgaggcctgagattgtgcatgtctaaggagcttttggatgatgccattgctgctggttggcggaccacactttgagtagcaaggctcgaagatcatttagaggttaattctcactgcatctaatttatggatgaaaacaaaccaaggtccagagagagcatatacagcttgcctaacaaagccattccctaagtgcctgacttcttgcatttaaacccagggcttcagcctttgtccagttctcactccacacatcacacggtttgttcactgttgtgaacgacagttgtggcagcatctctttagtttaggaatccagagccccaatttcactaccctctttggtcttggctcatgctgtgacttcgaatagttttgcccttacttaaaatcttcagtggctcttttgtaatcacaagatcaagttcgaatatctctgtctagtgttcatggctttataacatatggtatctctttagtaaccttacctaacttccctgttttaaaattgtctcttgctgccatagccctccttgctccttcctgctccctaacaaactgtgttcacttctctctcagtggtagtgatgatggcatggcctctgatgttagactcatgtaacttctaatcccagatccaccaccaacattggcaagttgattcatctttctgaggataagcatcctcctctgaaataaacttagatggcggttgagaggggtaaataaaataacacacaaacccactctcatccctgagaccctcttcaaaactagcatataaaaatagctatttgaagaggttcagtgaaattcaaggtaacacagagaaggaattcagaatcctatcagataaatttaatagactgaaataatttttaaaaatcaggcagaaattctgtagctgaaaaattcaattgacaaaccgaagaatgcactaaatctttcaacagcagaattgatcaagcagaagaaagaatttgtgagcttgaagagataatatatgaaaactcagagtcagagagacaaaagaaaaaagaattaaaagaataatgcatgcctacaaggtttgattattaagctactcaaagagatacaagagaagggtgaaaaccaacataaagaaatgtaaaaaacaatcagaatataaatgaaaaattttctaaaatgctagctagtttttttttgagacaggctcttactctcatcacccatgctggagtgaagtggcacagtcatggctcactgcaggctcaacttcctgggctcagatgattctcccacattagccttccaagtagctaggactaaaggcgtgtgccaccaggccaggctaattttttgtatttttagtagagatggggttttgccatcttacccagggctggtcttgaactcctgggctcaagtgatccaggagattcactgccaaaaaggatataaccaagtcatatagtcataggttatctaaagtcaatgtgaaggcaagaattctaagagcagtgagacaaaagcatcaattaacttataaaggaaaacctatcagtctaacaccagatttctcatcagaaaccttacaaaccagaaggtattggggtcctaatcttttggcttcttaaacagaatagctctcagccaagaatcttgtgtagagtgaaattatatttcaaaatgaaagagagaaatacagtctttttcaggcaagcaaatgcttcaggatttgtcacggctagaccatcctacatggaatgttaaagggacttctaaatcacaaaacaaaagatttaaatagaacagaatagaacctcttgaaaccaaaaaattcaaatggcctataaaacaataacacaataagaaaacaaagtagataacgatcaacatgatgactggaacaaatattaacattgaatgtaaatgacctaacactccacttaaaagacacagattggcaagataaataaaaaatcacaaaccaaatatcagctgtcttcaagagactcacttaacatgtaaggattcttatagactcaaggtaaagagatgataaaagatattccatgcaaatggaaaccataagtgagaaggaatagctatccttatatcatataaaacagactttaagcaacaacagtaagaaaaagacaaataaggcaactatataatgataaaaggatcaatcaaacaagaagatattacaatcctaaatatatatgcacctaactttggagctcccacattcataaaacggttatgatgagacctaagaaaaaagatcaacacaaaacagtgagggtgtcctgggttttctttttattggacagcagtgtactagcctatcactttcccagtcaggggatttttggtctccccattcccctaccatgggttcatgccaaagtccatattttttattagtgtttggaattggattttttttttttgaggtggagtctcgctctgttgcctaggctggagtgtagtggcacgatctcggctcactaacctctgcctcctgggttcaagcaattcttctgcctcagcctcctgagtacctgggactacaggtgcatgccaccacacccagctaatttttgtatttttagtagaaacgagatttcaccatattgtccaggcttgtatagaactcctgacctcatgtgacagggaaacaggcactcagtgaacttcatgcgattgaggagttaatgataatgagagaagggctgtgaggggacagcactggggacaccagagcctgtgacgggctgagttgctgtgccttgggagatgcccttttgactgagccctgggaaggagggggtgtgggggcaggagctgcctgcagagggagtggcctcaggtgggcggccacctggctgcagggaagaggtgacagagttcgtgtgcagagcttggagggtgaggaggaggtgggttgaggtgaccttggtgagggtgaaccatggggggctgtgggccctgctgagggaggccagccagccctggacctacagggtggtttggtcttttttgtcccattcccagcatccactgagtggtgaaactctgcaggccagggaccatcccactggccagaaggagcgcacagtaggtgcccactcagtgcatgttgggctggacagaacctcactctgccccctgcccccagctttgggagctgcagcaaggtccctccccctagggatctccatgcctctgtctctgaggggtgagatggggagacttcaaagggccatctcagagtgtgggggatagagacgcagaagtgtgggggatagagggaggcctgggctctagacccaaaggaccttacacacctcctgagtcttttcaaatggtttcttctgttactttaaaaatgatgtaagtcatcatatttattgtaaatcccaggaatctaatcatgcgtaaaataaggtgtcttatccttgaccccaccccttccccaattaaatttccaggatgttaccactgtttgcagttggtgtgaatctctctttaataatactctgtttatctcacttgtcgttttacgccaaaatacccattgaattatattattgctgaagaccattcttttttttttttttttttttgagatggattcttgctctgttgcccaggctggagtgcaatggtgtgatctcggctcactgcaacctctgcctcctgggttcaagtgattctcctgcctcagcctcctgagtttctgggattacaggtgcacaccaccacacctggctaatttttgtatttttagtaaagacagggtttcaccatgttggtcaggctggtctcgaactcctgacctcatgatccaccctccttggcctcccaaaatgctgggattacaggcatgagccaccacacctgcccagaccattctgttctactgaatcatgtgtggtgggcacctcttatatcaatacatatggattttatcttgtgtttgttattggctcccctttttctcattgcatggctacactcaatgctttgtccacacccctgttcctgggttggaatcttgtgacagaaaatgaagtaacaaaggctaaagctttctaaagtggagtcaggagattgcaagacaattgcactttcaccagcaagagctcaaaccacagaatgttccaatagatttggataaacagctgaagtcagtattcaccagccttcaacatctcaactaggagaaccctaaaattaactaagcacatagaatggaatggacttgtgatttaggattccttctcagccaatgagctgcttctgaaaacaactttttgtggaaattacctgtaaagaaaaccctctcctgtgcttgtcttacagaacactagtcagggctgccctgattcagtggacccgaattgctattatttgtttcctaaacatatggtattttctgtgaccttcatctcaatcttttttttaagttactgggctgtttcccagttttcataatgacgagacattctgcagtgtttcatacacatgtcttttccccatgtggagtattgatccaggagctcattcagtcaacgcatgtttatgaagcatcctgtgccaggctgtgggctggtcactgtcttcagcagagagaggacaggcacagtcttgccttcacagagctcacagctcagggaggctcttagaagtgggatactggtcggagcatgtgcacattaaacatgatgaggtcaaggttgctatagggactaaaccacagtcccaccaagatcgcattgagttcctgtggtagaccagaggtcagggcccctaagatgtcctgagcagctccctctgctcagaagttttggttccacaggtgacacacctgagcacaggtgacccctgcagaacctgtgattaccacccaaagccaagagtgagtggtgggtgttctaggaggaaccgtcacctccatgggcagggttggggaagactgaggggagcaggtggctgatgactttggccagaaggtagggggatgggcaggtgtgcgctcatagggaagggaagagaagggagggcattgcaggcaacaacacaaaggttggaacctgccttcatggactgagaaaagcagggagtccacccaggctgcagctggggagggaagacatggggagcagtgggtctaggggagaagcagactgcgattgaccttggggactgggcagtgagcagaggtgtgttatgtgtgtctgtccccatcatagatatgaggaggggtgaggccgcgggtggcacctgggtcggtgggatttcatagtgcctgctgttccctagagcctctctgtatagagggtcagaatagatctgaggctgtggtctgggggaaggggctggtggtgcttaccatctctaggggtgggaggagagggatgaggatgcccctgagcagtgaagcctcaaggtgtgtggagccacagttgtctctcattagacatgtgttttgcgtgaggatgccagggcctggtggttattactgttgtcaagtttgcatgacaaggacccaggtatccagggatccagagcacagggcccctggtgaggggatgaggctcagatggggctgaccaggttcatgtggtcagagtgggagggactgatggagagacagagcctcaacccctcctgtcaggagctgtggctatgtccaggagagatgacaaggatgacccaggacattgagtgagtcattgagacattgaaggtgaggacagggcagagaggaccctggtgactgctgaaatgtaggatgtgaggagggctctgacccatgcaagttacaggacctccccacccccgagcccacagatgacccttaaattgggcatcctgagtgctgtgtgtgcccagcagggacactggataggctggacctgagtctctgtaagggcagcgctggtctgtaggaccagagtcttctctgtgggtgtgacgtgggcaggaattagcaagatgggggtgacaaggcttggcttggaggatctggtacagaagcccatgggcttggtcagctcagcttctcaggggctcagctggggctggaggagcaggatgctgtgctcagggcatgctccaggcagcgtgatgtgtgtggttccagggtcaggcacgggggtcaaaaattaaccatgaaaagttcccaccttctgtaggcagagaaaatggcctgattgtcagggtcagggagacttaccatgtggccaaagcaggctctcagcctcccagagaccacaccctgggtgcagcactcagctctgcagggtatggcaatagatgtgccaagaaccccaacatccagatgcatgcaaaaattttgcgatatataaaatagagcagatcaagtttccctgcaataacgttgttcctggttgtgtctttttcttgtaaactagacatggacatctttccagcagtctgttctcatctgccaccttcctgctgcagcacctcagaatgaacattcctgagacactgtccgtggtgctgacgaccaagagctatggaacagagtgtgatgtagaatcttctagttacctctgctctcctttcacttttaacaacagagcatcattaacaatgagaaggtggagaggtgttcaggatcttgaagtgacttctgtcttgctctcccataaccctgaagctgctgtagacattattgcagaaactgacaccacagtcaggatggccttgtccaggagcccatgtgcagtttgtagtgagcaaggatgagaaaatggtcttgaaaggggtgatggacagaacaggggcttttcaaaaatgtcacatcatcacccccagcatccgtgaatctgtcacatggtaagagaccttacagattaaatgaaggattatgagtttggaagattattgtagtttatccagatgggtccaacataatcacagaatcccttccttacaaatgagagagggaggtgggagagtcagagaaggaggaggagatgtggggatagatgcagaagacagagcggtgtcaagatgctgcactgctggctttgaagatggagaaagaggacacagccaaggatgcaggaggcctctaggaggtggaaaaggagaggaaacgcactctgccctggagcctccagaaagaacgcagccatgtgggcaccttggttcaagtttctgtgtcacttagcttgtgggaatttgtcacagcctcaacaggaacctacagaggagtcaccttgtgtgcaggtgggatccagggtcatttacagctaaatcctgatgtaaatattgcaggttgcttttcctacttcctatctcatggccaacaaccctggacaatggcagaacacccttggaaaccacggctctgtgctttagtggagggaccagcttgtttgtgggaaggtagcacctggtccaagtgaacctacatgagatcgttactctccccagggccctcagggaagggctgagaacagctggcccaggtgtgtggaggagctgcaggtgaggcagggctggaggggcctgtgggtccaggtagaggggcagacaggttgtcccatcgccatgggagcctgcacgagctttaggttggggaaccctgctcctctgacctggacgctcctgtgtggagaggaggcttgctcagtgagatccacgccagggggtaaattgggaactgatgggaaatgaggggctagagtcctgggtagtgcctgggaggaccttgctcaaggactgaattcttggtctgttcccaccttggttactctgacaacccctctctgtgtcccacggggataaagatctcctgagcagtggccattgggacagaggagaacctggtggccagagctaagcatccaggatcctggatttggggacaggcaagctcattgctgggggacagtgatagatacggcctccagggcctgggtgaagagagcaggagggctcaggacactggaggctgtgtggaggtcacacccacgatctgtaccacccatggatgctcctgcattgctcacctttgtgtggacatcagatggccccaacttttgcactcctgagacatctcatgcattcacagagggacccaggctggggctgtgcatggccttggtctctagggtagtgtgaggacagctgagcactcagctggctgggcaggactcctgcgaatcctgccctttcctgtgtagggtccaccccagcctgactcctaaccccctactcctgtctttccagggaagagagactggggttgagataaggtggagatatttttcctgtgtgacccaggagagaatggacatggagtttcaggtgagtttctgctaagttcccatgagcagaaaaagagccaatgagaggaagtttcccctttattcagatcctttccaggtgaccccgggtgggccataggcccattcactttccctgcaagcccccgcttcctgtggtgatgggaagccttcgccttggcccacccagagcccggggcagtctgttgaggtctctatatattcagcagggacccccatcccttcctgtccccaggcctgtgtctcctcaggactcagagctggttctctggctcaggctccatgtccttccccatccccagggctgggggcttcagggacgctccatcaacccacaggagcagctcccagaggaacctaagaagccacatctgctttgtggtcgatccagcagtaaatgtttgtgtcagagtgtagcaattccagtaaaaacagagaagaggtcttgacccctgaggccttctcagaacagggtctggcatctctctctgggcccacccagggctactctgggactgaacctggctgtgctcagggggttcctgctcccaggcccctccctcctctgctcaccacctcctgttattttcactgcagtttcctgaacttcagctcagccagatgccagtggggacagatcctgggtctccctggggcccaagggaccagaatatctgtggcccccactcacctcatagatgagagcagctgccctggtgctgggtaggggaatctgggcaggggagagaggggtgtcaggggacagggaaggattcctgctgtgtaggaattccagggctctcctcaggtgatggagggtcccagggtggggttagcacagggagtggatgatcctggccctgaacagaggcccagctcatggccagggcaggtctaaccttatccaagtcattctgggtagggtgggtttgtgctggggattgacagtccccctgccctgagcctgcacagctggggccccagtggaaatgggattgggaacggacagtcttacctaggagatggagctgtcagagggtccatggcctggggacagagacaaaagtgagcacgagagtgttaggatagctgggcccctcctgcaagagtgtgtgggggtcctcagttcttagagaattggggagagggagcctttctcaggttattttaggggtcaagtaagcaagtgaggttgaggaagtgacccatgacccagagcccggaggttagggctgacccggccagttggggtttcctgtgtgatgttttatgggatcctctttgcagccccagggatagggtcagaggcccctgggtgtaactggcaggagtggacaacttggggctggcttagtagttcccagccacacccagactgaagggacactcaccgggggtggaggctgggggctgctgctccctgaagtcactctgatcgctggccctaggaaaggtcagggttatttgtgaaggtgcaaggttaaaagtcacaaattggagttaaaataggggaccaggaaaggagcctatttccaagaggggtatggagacctcctttctttatggagttctgtggtaggaggggcccaggtgaggggagttgaggaaaggccttacaaagccacatctgtcctggccagaggggaaggactctcaggcagatgctgggccaggagaacattgatccagtgacacaggaaagggactgaggacccagggaaggaatcagaccaccaggggttgcctgagaggaagggtcaaggcaccagggggaaagcagggccaggcacatgtgcaggacactgaggggactgcatgcatcttggattctcctggaactcagtgtccctgctgtgaccagacactccactcagggctggagatgctgaaatgggacaatgatcttgtcttctgtctctgccctttggcaagagacataaacgacattccaggatatgccatattggggccccggttctcccttctcacagctcagtgtctgcagttaccatgtcagtcaaaggggtgctgaccccacccagcccgtccaggctgttccagtctccactatgtgataatgcccaggatcccccctcagatgccctctcactgggtggatggattcagtgaacagggggaggtaccaggtattgagcaccgctcccccctgctccaggcagctgtggctttgctgtgctaggaaactaggaccatgctcaggggcatggccttaattggactgaattcactgaggacaaagctgttgaggaagcagcccagggtcagcagctggtgaggaaggtgccatggaatgagagggaaggatccctggggagtcgggaggctggggagagcctggcactgaatacaagacagggtctccttccttctcgcctggggtcagcgtgaaggatgggagcagaatggggaaaagctgtggtacctgccagtttttcggaggagcaggaaacacacaagtgcagccaccagaagactcccaaccaggaccccgatcaggatgcctagagtgttgtcatctgctgaaagaagaaggcaaaggggatgaggtccaaatctgttccagggggaaccatgaggggccttgcagggcaggggcatggtcagggaggaaggaaatgccatggagcctgagtgtggtctgttgtgctgtcctcatagctggctcccttgctctccgtggttgcaccattttctgtgtcttaggcttgaattactgggatgcatcaactcctacattctcccacaggaagcctgcacctcatcctgctcctgtgttttttagtccctccttcctctcacatcactcctcttccccctgtttctttttttccatcccatggcagtcgtaaagggcaggcccttgctgccaactcaatgctgatgagcagggatgatgttcattgactgttttcaggggccttccacatggaaggcacagtgggaatcaatctacctgcagcttttctcaccctcccattgccttgagggagaagggtatgtgatattgtgaaatacgtatttggtgttcatcaccattgatatggttaggctctgtatccccacccaaatctcaccttgaattgtaataatccccatgtgttatgggagggaccttgtgggaggtaattgaatcatgagggtgggttttttccatcctgttcttgtgatagtgaataagtctcaggagatcagatggtttcataaagggaagcttccctacacatgtcctcttgcctgctgccatgtaagacatgcctttcaccttccatcatgattgtgagacctctccagccatgtggaattgtgaatcaattaaacctctttcttcatacattaccaagtctcaggtatgtcttcattagcagtgtgagaatggactaatacagtaaattggtaccagctagtggagtgctgctataaagatacctgaaaatgtggaagtgactttggaactgggtaacaggcagaggttggaacagtttggagggctcagaagaagacacaggaaaaaagtttgaaacttcctagagacttgttgaatggttttgattaaaacgctgatagtgatatggacaataaagtccaagctgaggtggtctcagacagagatgaggaacttcttgggaactggaacaaaggtgactcttgttatactctagaaaagagattggtggtattttgcccctgccctagagatctgcagaactttgaacttgagggaaatgatttagggcaactggtggaaaaaaaattctaagcagcaaagtgttcaagatgtgacttgggtactgttaaaaacactcagttttatgtatttacaaaggtatggtttggaattggaacttatgtttaaaagggaagcagagcataaaagtttggaaaatttgcagcctgatgatgcaatagaaaagaaaaatccattttctgaggagaaattcaagccagctgcagaaatgtgcataaacaatgaagagcaaaatgttaatccccaagacaatggcaaaaatgtctccagggcatgtcagagaccttcctggaagccccttccatcacaggactggaggcctaggaggaaaaaatgtttcctgggccaggcccagggctcccctgctgtgtgcggcctagagacttggtgccctgcatcccagccactccagccatggctaaagagggccaaggtacagctggggccatggcttcagagggtgcaagccccaaaccttggcagcttccatgtggtgttgagcctgcaggtgcacagaagtcaaggattgaggtttgggaaccttcgcctagatttcagaggatgtatgaaaatgcttggatgtccaggtgaaagtttgctgcagaagcagagccctcatggagaacctctgctagggaagtgttgaagggaaatgtggggttggaaccccgacacagagtccctactggggcactgcctaatggagctgtgagaagaagaccacaatcctccagaccccagaatggtagatccactaacagcttgcaccatgcacctagaaaagctgcagacactcaacgccagcctatgaaagcagccaggagtggggctgtaccctgcaaagccacaggggtggagcccaaggctatgggagttcagctcttgcatcagtgtgacctggatgtgagacatggatacaaaggagatcatttcagagcattaagatttggctgccctgctggattttgggcttgcatggggcctgtagcccctttgttttggccagtttctcccatttggaatgggtgtatttacccagtgcctgtacacccattatatctaggaagtaactaagcttgcttttgattttacaggcttataggtggaagggacttgccttgtctcagatgaaactttggacttggacttttgggttaatgctggaatgagttaagactttggggaactgttggaaggcatgattagttttgaaatgtgaggacatgagatttgggaggggtcgggtggaatgacatggtttggctcttcttcacccaaatatcaccttgaattttaataatccccacgtgttgggggaaggacccagtgggaggtaactgaatcatgggggtggattcttcccatgctgttctcatgatagtgaataagtctcacaagatctgatggttttagaaaggggagttcctctacacatgccctcttgcctgccgccatgtaagacatgccttttgccttctgccatgatttcaaggcctccccagctatgtggaactgtaagtcaattaaacctcatttttaaaaaaattacccagtctcaggtatgtctttatcagcagccaagaccagctcggtcgcggagatcctaacccagcagtgctagaggaattaaagacacacatagaaatatagaggtgtgaagtgggaaatcagggttctcacaggcttcagagctgagagccccaaacagagatttacccacatatttaataacagcaaaccagtcattagcattgtttctatagatattaaattaactaaaagtatcccttatgggaaaccaagggatgggccgaattaaaggaataggttgggctagttaactgcaacaggaacacgcccttaagatgcagattgctcatgctattgtttgtggcttaagaacgcctttaagcggttttccaccctgggtgggacaggtattccttgccctcattcctgtaaacccataaccttccagcttgggcattagggccattatgaacatgttacagtgctgcagagattttgtttatgaccagttttggggccagtttatggccagattttggggggcttgctcccaacagactaatacacccattttctggtatgtgactctaaagtccttagaatcttcaaagtgatgtctttttcaagctaataattgactgatgactggcagcccctaggcaacttcagaatgaggctggtcactgacccaggtaggattagagggttgggactttcagcctcacccctaatccctggggagggacctggagtttgaattaatcaccaatgaccaatgaatcaattaatggccaatgattgaatcaattaatggccaatgattaaatcaatcatatctatgtcatgaaccccaaaaggactgggtttgaagagctgaacccatggaagtttctggagtgtggtgcatctggggagggcatggaagctccacaccccttcccacatgccatgctctgtgcatctcttcatctgcatcctttgtaaagtcctttattacaaaccggtaagcctaagtatgtgtttccctgagtcctgagagctgtttgagcaaactaatccaacccaaacagggagtcatggaaacctcaatgtgaagccagtcataagaagctctggaggcccagacttgtgactggtgggaaggtggtggcaattttgtgggactgagccctctgctgatatgtccaggtagatagtgtcaggatggaattggaggacacctagctgatgtacggtgcagaactgattggctgctgggtgtgtgggagaaacccccccgcatcacatttggtcacagaagtgtgtctgtgttgatgattgttattgtggagtgagagcagaggaaaaacacagtttgagtttttccaaacagggtggaatcccatctgccaatttagaatctgaaacttatagtttcagtacttcaattaagattgaagtacttcaattcagtacttcaattaagattcagtacttcaattaagattcagtacttcaattaagattacagaactggtaagtgaaagtgatacaacaaaaatgtaaccaaagtctgctcaacttaacagctaataacaacaaagttcataaaaataataccagtcgatattgatagcactgattgagccctggctctgtgcatgaccttgttaagggctttaatcgcattaatctctgaataaatatcctcacaaccaccctgagatccaggtgtttgtaacaattctacagatgaggaaactgaggcccaggaggttgagtgtcttgcccaaggtcaaatacctggtacctattgtaaccaggatgataactggatgagtctaatccctgagttcttacccacattgctccccaggctctgaaggaatctcatccttctcattccgtgtatcattttacaccccccctccctcctaggaaaatatacaaggaaaggagtgagaggggccgagggtcactcacattttacagtcagcttgagggggtcgctcctgttggagctgactgggttggagacctcacactgatactccccagcgtcctcctgcctgatggggtctatggtgagcatatggttaaaccaggacagcttcatcctcttcgtgacctgcagacgctggttgttgaaaatccactggaaagaggttccagtgttatttgtgtggcaggtcaggaccacggagcccttctctgtgactgtggtgctgctggcttggatggagggctgagccactgactctgtggatagagtgaccaacagaaagtgtcttggggccatgctgcatcctcagagatctcagagtcaaatttagaacattctcctgtgaataaaggagaaagatgaaggacagggaggagcagagagaaccagagacacccatagcagcgagcagtagggactacagtgacctcagagaccccagggaccaggaggacccagctgcctcagaccaggaccagggagccctgaaaaccctcccacagatgagcggccccagagtcacatgagatgcaatacctggggtggctttaggagcaggcagtcagagaaatggaacatgggtctcagcccctaagggacaaggaagaggtgtggccagctcctcctaggatcctacatccaggacccagtctgtaaagaggttatgattattcctttcttttttcattaattccctccctccttcatcagagaactactgagtgtgtgtctcagttgggccttgtgcaggtacagggtgtagtgggaagagaaagctgagtcctttccttcatcctcccatgggagtgacatcaacaaatcaagaaattcatgatttcacgtccagtgagggaagaaatgtggatctgatgggagaggcttggacaatcctggcattgagtctgatagttgagacaggtgatttcgttctaagtaaaaactgactaattctccatttgcccgtcattcctcagaccagaatctccctctctgagctgaggatgcccaagaagaaaggagctgaaccaacatctggtcctggggtccacagatgccccacggtggtggccacgaccagattctgggctgcagacacacggtggtgtgacgttgagcactgacagcctgtgtgatgctgatgcaatttctctttaataaaatggggtaaatgtcaatggtccctggcttgccatcctctctgtaaattaacattaaaatatttacaattacctgacctaaagcttggcacagaatagctccaaataaacatcatctattattattttactccaaaaaaaaaaaaaaaagagttctctgggcctgattcctggtggagaaggagcggtccagagtgtcttttctctgctttccctcctcctgaggacagtgcacttcccgggacatcttttaagtttcccatccagtttaatggcctgggaagtttgtttgtctgtcctctccactctgactctcaggtgaaagatgaggctctgcccttgcccagatggggctctgggggctgagccctgcctggtgaccagctctaggaaccacggccctgggacagctggtaaatcgttgctcacaatcagccctgcccaggaagccacaacccagccctggcacaggctccccagggtcatctggagtcaggatcttgggacaggggcctggggcaggggcttgaagggctgagcttctctcagaggatcctcaggccaggccctgactgagtcctataagatctttctcaggtcatgtctatgaggaggaggccaagcggggttggactgagactgattttcccccgctgcatctcccgcatcagactatccttcttgctgtagggaatttccacggagtccggataagggaaaggaattctgatctgttatagtttgtctcccctgggtgtgtcctgcactaaatgcccaaaccccaacatgggacgtaatgcagagggggatgcaggcacagcccaggcctgacaatcctgcgtatgtgaagcagaactgacccccaacacccagaggcacggaggaatcactcaccgtatacacggagatggtgagatgcctgttcaatctgagaatttctgtatgtgacttgtagggtgtagtatcccgtgtcctctagggtgacgttctggaaatgcagatctccactgggtgatattgtctctcgaccgctgtatgcaggccctggagtcctaacgtgagtgtctattacatatgctgcgattagctggttgggctccaccgttttccctttgtaccagccatagctgtaaagattctcgggcagataaaccacagagagatgaacattctccccttcagcaacttcaaagggcgctgatgcaataaagagccaggcagtggtgggtgcgttccagaaagttaaaagtgaggctaggaaagggagagaatatcagtcaatatttgacctatgcattggcatggaaagacggggtcctgggtgcaggtctcttcacccctcagccttagagggtgtgtgtgtgtgtgtgtgtcctactgggtcaaagtcagcagcatgaccctcattccttcagtacctctgaccttggcatttccttgtgtgaaccctctttcccaggggtctgcatggttccctccccactgccttcagttcctactcacacaagggaatccctgggagacttctttcgtgaagcctcctctagagaccctgggtcttccctttctgacctttcccagctctgttccctccagggctcttgtcagcacctgacctcacattctagatctctttgggtgtctgtcttcccccccatgagattgtgagctctgtgagggcatggacttgagtgatgttagttgcaccccagtgcctgggacaggctgcagactcctgtggatgagttcatgagcgttcccagggccttccatatcctggggtttatttgctaatgtctgaggttggcagatgaagacagagtttcatgccctggtggtgtttttatttaaattgtcactgtgatatagttttactatcattttcaaaatgtagtggccactgacaatgaacttgaaaacatggaccaactgagattgttttgccccttggcaattccagttcacttagattttttggttctccttagacgctctctcccctgagtctctaacaaaagccctctgtctcctctcagagccccatcctccccaggagaccccagccagtctctgtgctccctcctcccacccactcccagggagtcctcccctcacctgtgagcaagagcccctgccaggggatgcattctctgtggggacaagctgaggggggccccatggtctctgctgcctgctctgtcctcctctgtggagaggagcttgggctccaggaacgctctagacagggttactgtgactgttgtctctgctgtccttccttcctctatgctgagcttcctctcaggcaggagcacttcccgtttatgggcaagggcggggctctgcctacaatgtctctctgtcccctcccctctcagtcctgcctcccttgtccctcctttctccttcctttttgcctatatttggttccctaggcaaaactttgagaagcaacgctgatggggtcctcataacaggacgacccactctccccagtactgacctctgctgtgttctggccttggttctgtcacagccggtagattatttccctttgtgacacacaaaaccagctgggccctgggtctcctcatgctctccagtgctccaggaaggcagaatgatgcccagcaggaaagtgacagaggtggctctgggggctagaaaggggctcactgggtgatggctgggaaggacccacccgctatcttcagtgtcaccagcctggcctctgacccagggacagagacccaggcctggaggtctcgggaggatccccagctcctaggtgtggagggaggtgtcctgtgtgtcctgggaagagaggactttgatggaaggaggtgggaggctctgggttctgctgtccttggtgaaggtttcagggggaccctctccatgtctggggtctgtgcccccagcttaactctcattctctttgcaaatacatatattttgtggatctgcagttgcctgaactgtctcatgtccctaaatctttgtatccctttttacagaaggtcaggaagggtgtgtacatgagtatgaggactatctgatcagggcgagtgtttgtttcccaaagatctctttagatatggtataatacataagataaatgtactgaattagcaattttaagtgtagaattaaatgatactaattctattcacaatgttgtacaaccatcaccataattttttaccagaaaatcttcattataccaaatggaaacttcatacttttaatcaataactccccacttccccctgccccacccactggtagcctctgatactatcaatctctgtgaatttgcctagtttacatgtctcatataataaggaattatatacgtgtattatttttttctggattatttctcttagggtaacacttttaagattcatccacgtcgtagcatatattacagcttctttcctatttatggctgagtaatatcccaatatatgtttatacctcaattttaattcattcatctcttaatggacatgtgggtggtttccacatttttgctattgtgaaaaccgctgcaatgaacttacacttggaagtatctgtttgggtttctgtgttcatttctttgggggtacatataggagtataaatatggggtcatgtggtagttctatgtttaagtttttgagaaacagccaaactgttttccagtttgctgtgctattttatattcccatcagcaatatacgagggttccattttctctacattcttgtaaacacttactatttaatattttttaaaacttatagccattctagtaggtgtgaagtgatagctcattgcagttttgattttcatttccctggtggctgatgaagttgagcattttttcatgtatttactgacaattttaatattttttagagaactatttattcaaatcatttgctgtttaaaaaaaatgggttatctttttattattcagttgtaatagttctttatatattttagatacaagtcccttatggggtacatgatttgcaaaatttttctcatattctgtgtcttctcactttcttcatggtgttctttgaagcacaaacatttttaactttgatgaagttcacttatctatttttaattttgttacttatgctcttgatgtcatattgaagaaaccattgcccaatccaagatcattaagttttactcctatatgttcttctaatggtttgataagttttgctattccatttaggtttttgaaacattttgagttaacttttgtatgggctgtgaggtaggggtctaactacactatctcgcatgtggttatccagttgttccagcacaatatgaagaggctaccattctttccccattgaggaatcttggcacccatgtcaaaaaccaatgggctgtaatggtgagggtttatttctggactcttgattctattccattgatctctatgtgcattcttgtgccagaagcacactgttttaatgattgtagtgttttagtaagttttcaaattaggaagtgagtcctccaatttttttttccagattgttttggccattctggggtgacttttaaaaaagatgtagttcaatggttctcaaagcaggagtggttcagctctccttttttggcagtctggagacctttttaggaccttaatctaagtagataaattattcccactttcttttctgagttgctatgttacagtgtatattgacacccatgaaataattgagagaccctggaagtgcttgcctacatagtgagggacaattagttccatgatcatgggcacagaagattttgttttgggaaacaattttgttggtggagttatattcatgcttactcttttatttgtcttcatagcctgcatctccttcagacttcatatctgtttattttcttgtttgtcctctggggtttgggtgttgggtgaccagtcagctggagctggaggaggtgcttagcaaggcagtgaccctggttgggaggagcagggctcagcagggtgaaagtagctgggccttgagtcaggagtggcatctggaaggcctgactgtaagggtcagaagggccagcaggtgggtgtcctaggcacaaacggtggctgctgctgtggactggaggaaggtaagaggccccgagtattccatgttcttactggctccccaactgaggattcctctcctgggctggtgctgtcctgcagcagggaggggttagacagggacggctgcacatcaggccggagtccatgtcatcctcttaggcactgtcactacagattgaggattctgttcataagccaagcctttgcacaaggaagggacccgggctctcaaggaagagcagctcctggtcagacctccatctccttctctctcattgcctgaggcctcaagcttggtctacctggcacaggggtctggatcctcctcccagggttggggtcttactgagctgggcacctgcaggtgggagaagatctggaggggccccatctgccttcaccagattgatgttgagggtccctgagtcctgcaccactatcaggtgctgagcaacttccagtgtcagtgacaaccaccccatggtggaagcagaaccacctcgtgagaaagcacctccaagcctcagtgcttgccatgtgtgggaatttgctggtttcagttgggggcatgttggtgggtggtcatgaattcagggccggattctatgctcacagtgcacatgctggatgtggtacagaccccaggcagggctcagtggggtggttttgggtgtgcacaggtatcttttctggaggagctggtggtgatttggctcccagaagttcctgagctctgcagactcaccaagcactcaatatttgagtgaacattgggcgagagagcagaaggtaagtgtcagggcatcggggttggtgcctctgggaagaggaggaacattctgggaacaaagctctcccccggcttacagggagcttcccatcgctcctgccttgaggatcagggaaactagggcctctgctcttccaggggctgcttgcaggcagtttgctctgggagggggtgacccaggagttgcctctcattttgcatttgagatttaaaaggagaagggacagtatatcttgccaggtcacaaaaattacaggcatcatattgactgaagggcactcctgtcatcactgcaatataccagaatggtcttttaaaaaaataagtgatttaggtttaccagcaactgtaatgcttgttttattcttctagttcaccgttaatgtcacttttgtagttttagcactggcaatgttgattttatgttgactctgatgattttaagctttcatttgttcacatagagatcatcttctttctgaatattaatgcattttttctctatttctactggttattcctgtacatagagtagagaatcacttttcccaaggaggtggaaagcttctgactaccaaaaaaaaaaaaaagtgtcaaaatgctttaaagtcagtaacttaaagatcaaatccaagagtgggcaacagattctgcccagggtctgaaaggtggagaggtgactggtgaggatgtttaaaagacctctcctctctactccctaaatgggggccatccagtgttcttgaggttcagagaaggcccagggctggggcagcagggcactgtcagctcccagctcccaggggccaggagtaagaccccaacactgtccagacactgattgcattcattttgggggagagtagattcttatttaaagaataatacaaaagtctacaaatatgaacataaacagaaattcctttgctacaattttccccttaataagacattccttcctaatgacatatgtgactgcattcatggctgagatgttttctaggatggtgagagcatcagagtggactatctggtgccttggggtcatgcattttcttcttccaatgtctacaggatcccccatgtcccactttgtagtgtaactcagtgtgtgtcattctggtttttgttgtatagatccttggaaagcccatgtcattcctgctgtgaggtacaggcagccaaatggcatcatctctaaacatgccttctcctggtacatcaaattatggaataaatgaaagccattttgacagatattgaagatataagtttctactcttcccacacatgcttctcccaagtgaaggattttactggtgaattgttattagagattagtgtggatcagtgactctgccaggggaaattttgccctctaggggacatttggcaaagtctggaaacattgttggttgtcagagctgggggagggagtcctgctggcattgagtgggtggatggtgctgaacaccctgcagttcacagagccccaccagtttgaccacccaaatgtcaatgctgaggagtggagagccctgctgtgccctcccgcagcttccctgaagcttcccctcacctgctcctcccatgtctccccaccacttccccacttcacccgcctccttacacctcagtcccctccacctgaactcaccccttagtccaaggccagccctgatctccgctctcctggtctccttgctccttagcaggaggcgcccactagatggcgcccttgcccttactggagctcaccgtctccctttccaccctgagacaaatgtggctgcttttactgccacaaccccagccctccacactctagatttgctcagggagcagctcctggacagacctcagggaccccagggaggagcctcactctggagattttgatggcatggtctttgaacttcactgttacccccagtcaggatccaggatgttgggagtgcatgattctgcccggtcccacttcagcaggaccccactgctgagttgtctgtggggacccgggcctctcatctccttcttgcattgcaggagagggatcttagcactgctttcacataaagtcagataatggaggagtgcaggtgagtttgggaaggtggacatgaagagaggttgtgtccctagaggtggcagcagtgagaggatgggcaggtgggaggaacacagcccatccagggttgccagccatattaggagcgacagcctttcctctaagcctccagcctttttcctgaaacattccagaactttccacttcagcacttcccactgaggctcctcaggtctgtccctgagctcccagctgagcctacctacccatctgaaatcctgagtcctgtgtcaccctcgttccccattattctgtgcagttctgtgggacgcccagctctcctgacacccccagtcttcagaatggccatcagcgctgtcgctgtggcaccagggtgactgccgcctggaggctgagtcctggcttcctgacagctgtggggcccgctctaggctcccttgtcctgatcattcatcacctccaggatgcacagcagctgggccagggggaggagcagggacaggtgtcagccaccctgtgtgtctgcaagtcaggctgggggtgtgggaggacgccaggaatgactgaactttctgatttagagggtgagagcttgcactgatggaatttgggatttaataggaaaagcatagcgttttcctattttgtaggcagggtggctggagtttggaatcatagattcccctgggatgtcactgtggacctcagtcccacccgttaggggcacagatttcagaatccacaccctggggcaaagcaggcatgggaggctccatcagcctggccagggctctctatttgtgcagctgctgcaaggagatgtgcactctgatgggaacagtgctccctcctccttggggggcagtatctagctccctgcagcccctctccctgcaggccctgccctctctgaacctcaccttccccaacccgccccccgcaatcccatctcagctgtaatcccaacactttctcatccattatgggtggactgcttgagcccaggggttcaagactatgctggctggacaatatagcgagttgttgtctctacaaaaagacaaaaattagctgtgcatggtggcatacacctgtagtcccagtcactcaggaggctgaggtgggaggattgcttgagctggggaggctgagttggcagtgagttgagattgtgccactgtatacttcagtgtaggtaacagagcgagaccctgtctcaaaaaataaaagtaaaaaaaaaaaaagaaatatggaatacattattgttaactctaatcaaccatgctatgcaatagtccaccagtaataccagtaatagccaataatgaattatctgaaaaagaatacaatttattcttagctatctactgctaaaatttttaagctatcttttatgatagctgaaacaaaagaagtaaatttaaccaaggaagtaaaagacctttataatgaaaactgtaaaacattgatgaaataaattgaaaaagacacacgcacaaatagaagatattccatgttcatgaattggaagaactgatattgctaaaatgtccttaccacccaaagtggtctacagattcaatgcaatttctgtcaaaacaccaatgatattcttcgaagaagtagaagatcctaaaattagaaaccacaaaaattcctaaaacctgcacaaaacaccctgagttgccaaagcaatcttaaacaaatagaacaaagctagtggcattacacttcctgacaatcaaagcatactgcaaagctatagtaaccaaatcagcatggtcctggcataaaaacaagcacatagatcaatgaaacagaataaaaatcccagaaataaacccatgcatctctagctaactgattttcagccaaggagccacatgcacacaatggggaaaggacagcctcttcaataagtggtgctggggaattggatattcatatgcagaagaatgaacctagaccctatccctcaccatgcacaaaaaattaactcaaaatgtattaaataaagacttaaatgtaagaactgaaactatgaaactactagaagaaaatatagggggaaaatccatgacattggtctaggcaaagagtttttggataaaatctcaacagcataagcaacaaaaccaaatataaacaaacgggatttcatcaaactaaaaagcttttatacagcaaagaaaaaaaaggccagcagagcaaagagacaacctacaaatgggaggagaatatatttgtaaatatatacatatatatttgtaaatatatacatctgataagaagataatatccaaaatatataagaaaattatgtttctgtatagttttatctgactgggatacagaggccacatccacagtcccatcctcaaaggccacttgttcccaaaatgtcaagcacatccctcaatgatccatcatcaacacctatgtctgtaggatgaagggtgaatcatgaagcactaaaaaggaagaaggaagccaatcccaaaacaaaatgatgcagggtctggaaagtccaaagcattttttttttttttttactgcatcttcctcctttcttctccacattcccaatcctcactattgattaacaaaacaaaaaaaactgggacccaccatcttccctactgtcaggagatctagcgagattgtttgagtcttagaccaaactttgccataagccaaatttctggctgactttacaatgatatgagctagcacagtctctttttctgccagtcaacttgtgctcggttttatttgcaaccaaatagaggtggtaaccaaatataggtgaccctaaaattagtcatcaggatgaaatcctaaaatgtgcaacaaactgggttgaattcaggattagtagcaacatctctgttgtgggcttgaaaagggggcacccttttatgcagtagcaaaattgctaaattgttgtttgctgagtctttggactctcatcccggattttctatgaccattcaaacagggctgcaatgaacatctatggttgtttagcttggcacacttctacatttctatatagtaatatctagaagtgcatttgctcaatcacaagatatgcacattttataattgactgctatcgaactaccttaaatagccttaatttgttctcaacattgtttaacagggtctgtttaatgtcctacgtccagcaaggacagtatcacttttcttaatatttttcaaattattggaccttaacaaatacttaatgtgcaattaattgattcctttgtattcccatgccttcttttatatgtttccttatagtacacaaaaccacattattgtttctttacttgtgtcattccaccctggaccattcctatctaaactataacattatgagagagagagagagagaaaacaatatgaaaatataaattgattaatcaaaaaaatttaaataggacaaatcaggaagacacaagagagattttaaaattattcagagaataccacaatagctgtaccaatatattttaaaacttagatgaaacggacaactatctcgataaatgtaaattaccaaaactgactcatgaaaaaatggatattatgaatagagcaataatcagtaaagcaattaaaaagacagttgataatttttatttactgacaacaataacaaaatttcaggtcctgatatttttatggtgaattttaacaaattttcaagctcctcctcaaccaattctcagaaggtttaaaactttaacaagaaaacactttctaacacattttcagaagctgttatagcatgataccaaaaccacacaagaaaattatagaccaatctcacttacaaatatacatgcaaaatcaaacaaaatcttagtgaaccaaattcagaattaataatagcaaacaagcaaaatatgttatcatacgtatggcttatatcaggaatgcaagtatgtttcaacatcagaaaatacttctccacattaacagactaaaggagaaaaacgcttgtttaattatctcaataggtttttagagaattttgaaaattttataaagttatgcgtattctgtaaaattgatgaaatccaaccttgatttatttttaaaaattgcctttcctatagaattataggtaaaggaaacacatgcatcctcacagagctacttcaaggctaagttacttcccataagtaacgtatcctgtaatgtgtgcttggcacatattcaatactaaacaaatatttgcaaatcctcaaaccacttctcgctcaaataacccacctttgtcttttgcctttatgttagggttgattttctcaattgtatcttggagatcctttggtgggtctttcagcaattaccctgaatttgcttttctgtttacaattttaattcctgggaactctttcttgttctctgactgcacccttttcatgagagttcagccatcaatcctccagaaccccaccccccccgcccccccaaaaagcaataaagatgtctaaaagcttccttctgggctttcgaatgatgtttaccccaggcatttgttctattcgttcatcacccattttccctacaacttgcctacacttgatatcagatttttatttattagtcacctatcttcttcattggcccattttcctattttgccactggttgttctcaaatgtgttatgattcctggttgtacagtcaagtggttgataatcttggatatacgataaagatttgctctgtagctgtgtgtaagcctatataaaagcttttgtatttttcttcttaaaaaagacaaaagatggttgggaagatccctccagttcaccagttcgaggctgcagtgagctatgatagcgccgctgctctagcctgtctgtctgtgaaaaacaaggggggcggggggcgggggggaagactggagatgtaaatctcccgcagggccctacccgtatccgcaacaggtctctaacaggaacagcctcaggcctgtgttggaacaaggtaggttacagaaatctggaagccagatctgtaacttcagggtaaggactggctctcagggctgatcccccgggctgggtgtcccagaggcacccgcccccgccccttccccaaggcaggccaggacaccttcactcctctccttaggctccccacccccttctcctccccactgtgcctcctggagtagcggtggcggtgccacaggggagcggggcggggcgggctctgagggcaagggggatgggccccgccggggtcactggcggccaccctggaaactcgacgcaggccggcccttctagtgaatcgtcccagccacagctggcctcccagccgcgcttggggcgcctcggggcgcgaatggtgcaggttggggagactcaccacgcaccgtcgggggtcggtccggttattcctcaccgctcggctccagtgggcgcgcgggcctctcctcctcagttcctgcgctgcagtccctccctcacccttcgcagcttgggaatccaactgtgtcattccgacggagcgccgtgaggacctccgagggtgttagcgccaagtgatctctgtccagcgctctgaatatccaagtaaaggagttcaatgaagggcgggtcaacggaggagaaaccgtgactctctcaagggagcccaaggcctccttgtctaattagtgacgcgccaatggatggaggctcttcccaccatctcttcccagcatccagtgacaccaccgccaagggacgggctcggcggaacctgcaggaaagaagcatcggctgagcctgactgcagcgctgtgaagagacaggggaggggatcagtagttggtcccgcgcccaccccctgtttccgcgaggggcggagttgactggccatgcaggcagagggcgaaatgtgaaattccactactcctaccgtttttccctgacccgatggggcggagtgtcgtcaggctaagttccctggcggtaaggtggggagattgaggcgcacacctgccgaacggtaacgcaggattagctaaggcgagctcaggacagaagcctcccgaggagcaggagggcaaaataataaataaataaataaataataaataactcactccttggtctttatttgcggcaggaattcagaaggtgaaagcggggccttaggatctttctgaccttttgggttttaagcaggaggtgtcagaaatgttaccacagggctagctggcttgtggccagcaagcgttcacaatgccctcgatttttcatccctctctgtgggttctttttttcattgtaaggcagaatttctacgattgctcacccactcagagaacctgagctggtttagaccaggtgagacaggctaggtttaccctggtgatgatgtgttgttgccatggcgatcctgcccagtaccagaggccctgcagattcagatgcttggtgcctgtgcttggctgaggggccaatgggtgaagctgccatctgcgggatgatgactgaagcctctaagtcagaatccgcccaggctgagccttagggcagctccatggagcctcggctggcctgggatagagagtccaccactgtgccagcccccagccactgcctaggtcctgtgctgagagccccttgtccagggaaatggcgtccagtggaaaagggaccacccccttgcccttcactcaaggcaggttggtgacaaccctgaagctaatccgttcctagaggagctgcttctgggtccgagttttctctgcagcagagcagctccctggatgggatctgttcaaagtccgcctttcacgcggaattttccgtccttgcaattttccacctccaccactaggggatcctctctgaccgcctcatgccggctctggcctctgagcaggggtttctcttctgcatgtgcgaccttgcgcatgcctagtggccttttgggacctagagctgctccacaccccgatggggttacagagtgcctcgcctccactccaccccaccagggttccttccctggctgggatgggatttcagaagcgccgaggaacagcccagacaggtgtgggagagtagccaaggcccctgtcccggggtggccaggacagcggtggcctcgcataggacctggctgggctgctgcaatcagtgtcctgccccttggagagcaacagtgaaaacaacaagactatcttcacccaccttaagaaagaacagaaccagtatccccaactctgctgtgtatcccaacccaattccattccccaccccactctcagtagccaatatgcaaaatattagaatactcttactgttattattttcaaccacactctgcatcctgaaaaaccatatatttcgttatgtgcttttaaacttcttgaaaatgaaatactgaggctgggcgcagtggctgacacctgtaatcccagcacttcgggaggcggaggcaggcggatcacgaggtcaggagatcgagaccatcctggctaacacagtgaaaccccatctctactaaaaatacaaaaaattagccgggcgtggtggcgggcgcctgtagtcccagctacttgggaggctgaggcaggagaacggcgtgaacccgggaggtggagcttgcactgagccgagatcgcgccactgcactccagcctgggcgacagcgccagactctgtctccaaaaaaaaaaagaaaaaagaaatactgaattttcaaatacttgctttttttttcggtcaaaattatgttctcaaatttcactcctgtagatgtgcgtggctggctgtagtttttgcatttttattattaggtattctcctgttgcattaatatgccacattttatttctctcatgtttttggtgaccacttggggtgttttttggttttgtatttttgctgtatacatgctgccatggtggacatacctctttatacatatttcctgttgtatgcagacacaattttaggatgtgacatcttcagcttttctattgtgtcgtgtgtcttttccttcgtgctttgtgttatttacatattctggacacagattctttgtcaactgtatgtgctgcacatctctttcccagtttgtgtcttcttcttcttttttttttcttaaaaaaaactttctttatagtgttttttttttctttctttctttgttttgttttgtttttttgagatggagtcttgctctgtcacctaggctgaagtgcactggccgatctcggctcactgcaacctccgtctcctgggttcaagtgattctcctgcctcagcttcccaagtagctgggattacaggtgcctgtcaccacacccagctaatttttgtatttttagtacagatggggtttcaccatgtttgtcaggctggtctcgaactcctgacctcaggtgatccaccctctttggcctcccaaagtgttgggattacaggcgtgagccacagcacctggcctgtgttctttcttaagtagatgttacttttaatataatagaatgtatcatattttgcttttatattagtactttttctatctaattcaaacacatccccaagggtctttgtgtgtagactgaccaatttctcaagaatcatgaatgaatactgcttctctttccccaatttatctgtaatgctacctttattataaagtttctatgcatgtgtagaaatagttcctgatttttcactctgtgccaccagcataccaatagcacgctgtcttaaatattaaatagcagagctttatgagacaacttgatgtgcagtaggcaattgcccccttgttactcttcttcagggttctttgttgtaccacatgaattttagaattggcttgtccagctaaaagacaactgcaaggattttatttggaagttcataattctatacataatttggggaaagtattttcataataccaagtcttcctattaatgaacacagactctctctctctctcccccacccccacctgtttagttatttatatctttatggtctgttagttattgtttattgtctttcaaccaggtttcatgtttttctacatagaggccttgcatgtgaaagtctttcttcctagcttgctattacaaattttttttaattgcactttttgggtacagtggcttgtactgtaatccccgatacctgggaggctgaggcagatggattgcttgagtccagaagttcaagaccagcctgggcaacataatgaggtccctgtctcaaaaagtttgttttaaaaattgcatttgctgttattcaacaaatgtcattgtgtctcatatatggatttttatatctgataaccttgttcaacaatcttttgattctaacaatatatcagattcttttgagttttccatatagacaataatgtcatctgtaaattataattgtttcttctttgttatttcttggaccttttattttatatttttgtcttgctgcaaggcaatatccctctatatattgtggggtcttttttctcataaagtggggatggtgaacacccttgtcttgctctctgattgtataaagcatgctttctgtagcattttgtagacgctcttttttagattgaggtaattcacttttatttctggtttactgagtttttagcataaattcaggctgaatttgagctaaagctttttctggagacatcatttgaaaaattcatatgatttactttctttaagtcaccaaagttatgatttacattgaactgagtttctactgtttaactgtattcttgggagaaaacccacttgtcactgaacaatatctgttttatttactgctgtcttgtgtctaaattttcttttaggattttttgtatatgctcagattagcctgttattctcctttctgtatttttttctggtttgggggtcaaagttataatagcctcacaataagagctaagaaaccagccctaatggaggccggggcaggaggtttggagttcaagaccagtctgggcaaaatagtgagacccccatctctatgaaaaatagaaattagccaggcatggcagtgagtacctgtagtcctaggtacttgggagggtgaggcaggaggattgcttgagcctaggaatttgaggctgcagcgaactatgattgtgccactgtactccagcctggatgacagagcgagaccctgtctcaaaagaaaaaaaaagaagaaataaaaaggaaaagataaaagagctaagcatctgtttccttttttccattttctgggagagtatgtgtaagactgtaattaactgtttcttgaataatgggagaactctgtaaaataatctggctttggtgttacctgtattggaaggatgaaaaataccaattcagtttcattattggttgatagggctactcatgctttttgttttgttttgttttgttttgtttttgagaggaagtctctctgtattgccctgttgtccaggctgagatgcaacgttgttcacaggcctgatcctggctcactacagcttctaacttccgatctcaatagatcctcccgcctcagccttcccagtagctaggactacaagcatgcagcatcacatccagcctcttttcctgcctgacccagttctggtttcctttagttttctaggtgttcatccattttatctaatgtttaatgcatttggcataagggtgctcagtgtcctttcattgtctgttgtctgtaactgttgccattttcattcctatttatgagtactggcgtcttctctcactttttcttaataatcctgctggaactttgctttttaaagaacatcttttgacttgttgattcttttttcatacatattaactattttcttattttttgcctttatatttatttcttttcctgtttgaaacattgctcttttcttactataaaaatgggtaagtagctcatgaattaccacctcttttaaaaatcttttctactgtaagcattttagcagtttacatttgcccacaagtaccacttcagctacaccctatgtgcttttacataaagtcttcatttttggtaagacatattctcaaattttaattatcacttgtttttaaatccatgatgttttatttgaaatgttgtttctaaagatacattttctggttatacttttattcttctaatttagcacagtggccacaaaacatggtctgtgcagtgcatacaatcgatgagtaatttctgagctgtagtatttggcataatatatggcaaaatttcctaagttttccatgtgtgctttaaaaaacttccagtaaaatacataaatctgttagatcaagcttctcacattgttcaaatagtctatatgtttactgattcatttgactgcttgatttatcaattacaggtaggaatgtattcaaatctcctattaaagtgtgacactcaagtggctttttaaagacagagatgccaaaccaatgaatacatgattttccccaaagcctgcacaaattctctaatgaaattttaccatgaaagtttgtttaattaaggcttactaaagcagtatgttgtcttttactttttaaacagagaatatatattttaatacatcgtttaagtttatgattaattatctattactgaggataagaatctttgcctgtgctcattcagcatttgcacttcatttatgatctgccttctcatagcttctgttaatttttatactagagacatttatttgtttgtataaatgttgaaggtttttttttgttgttgttgtttttgagtcagagcctcgctctgtcacccaggctggagtgcagtggcatgatctcggctcactgcagcctccatctcctgggttaaagtgattctcctgcctcagcctccagagtagctgggactacaggcatgtgccaccaagcaaggctaatattttgtatttttagtagagatggggtttcgtcctgttagccagggtggtctcgatctcctgacctcatgatctacctgcctcggcctcccaaagtgctaggattacaggtgtgagccaccgtgcccagctgggttttttatattataaggagatgtaatagatagatagatgtttcaaagatagtcaaatgtttttaaaatttaaaacacttttttacaggttgactttcaccatttaatttcatctatgtgttttgccttagagaaattttaaatgctatgtagatctcatgacttataattatgaagcattttgttttctgttttccacgaaacttagcttaactttgagcatataatagttgtaaaggtaggagagtaacactgaaaaaaggaattgcataaaaatggcacattttctgtagagttgtttatcgcctgaaaataggccccatttcatggaagtaagatgatcaggctcaggtccccagacgaaactcttggcatggtttttggagatagtccagggctcagtactggctctatcatttgctacttctcccaaagtaaccaatatctcatccaccctgagcccatttccatatctctaacatgaggataatagcatctaccttacacaccaagtagagggatcaaatgtaggaactaaatcaaagtaccagcactgaataacctacatcctcccacttcccaaaaggaagagagatgtatcccctgttgacaaacgagaccattttgcaggagagaaaggaaatgccagttcacttgcaatgtaaacatgctctctctttttagggatgtccagggacctgagagagaacccatgcttaccaaagagtttctagttccagacacacaggactcgaagggtgacaagtatggttttcagggtccctgaatccacccagtcctcacagaaactcctaaaagctgtcgattgacagcgttgagttcacagctctggtcctcacatgctgatactgcttgtgatatcgaacccgacaggaccccacatcacaattgatttaccaactacaatataatacctcctgaatctccaaattggctcacccaggaacaaaggcttggggtaaaactggattaggagatataagctctgaattttctgagggtgagacacacaaggattctaagtgacacgccacagagtaacgggtctgtgactggaggacccacagatttgtcttactggagacaccacatgcacacaaactccatccttagctgtggaaacaagggtcttttgctatcttagccgaattctgggagtaatttttggaggggaggagatctttgggattgcctctttcaggccctttacaaaaatacctacttcttaaatggtaaagcttacactaaactgaaaaaattacatccttggctttttatgaagtaggtgttggattgaatcactactggaagaagtatggcatcgcaaattctaagcagtggtcaaaggatggatctgttaaattagaaaaatctctaaatttataaaaagattttagattcctttattctaaacaattgacctatttgtactcatgggacaatcaaatttcaaaggagatatgtaacgatttcatggcttgcattaaaaatccttctgataaaattaaagataaaaaatctgaccccctgccaaaaaaatcttttgaagttcatactgcctgctttcaatattctgtgggattcacaatgaaaggtgccttatattgtggcctagcttcaagtttatgccttcgccaccatggcctgggttcaattcccagtcagggccccagcgcctttggtttaatgtttgcgtggcatttgacttttttacctatttagtattggtgagattacctttggtaaaaaaaagtttaaagagtggaaatcgcaattctttgtgttggctaaaatctgattataagagatctggaaggttttatttttctttttcaaagagctctatggtcagaagtcggcttcatgaaaagctaatatttaattatatgtacatacagtctttctggattttctcttttgcctcctgttttgaaaaatatttggatttgagtgaaactccgttttagaaattaattgcttggtacaatatacccatgtaactaccctgcacatgtaccccctgaatctataataagagttgaaattttgacaaaataaaattagattttgaattaaaacaaataggtgcttggttcctctgctcacttctttttaaaaggaattcctctcccatgtacttcttcttttcccttctttaccttccttttggcatctttggtatcacatgaagggatctagagggaattttaagtgactctgaaattccttgagaaatacacaaaaagatcccactcaccccttttgggggtctcctgttctccttgtggagtccagagtcagggacaggctcctccaggtctgcagctctgctctcttttatttcatcttggctgattgctttggttttgtgagtaccaggcattactttgtactgtgagagacacgtcctttgtgagtgcaacggctgctgggtcactggtgagggctgcagtttggagatggctgagagccgttgcaataaatggttgtgattgcagggggctccttgtttctttgcaagtttagatgagaaaggtgcagtttggacacagtttaaaggctgtgaaaacaccaccaatgaatatgatttcctttggggatggtctgattaaaagtgggctgattgttgctgtgctactagccttgaagacatgtttctacagcattgtgcagtgtggaaaaattgtgtggcttggtcttgtggcatgtcccttcttttagagacctcagattcaatgtgaaattcgggatttttgattttcaaagatctagatgccctgccttccagatgtgcctactcttcacatattttaaaattagatcctataaactgcaaatactttgttggcttctgtgagatcagaggtccagttagaaaaggaagacagtttgttaaaattaaaaactatttatctaatctaactagattggcctccaaatatgactttctgacattcagctggttactctgaaaagatttctaaatctcttgaggctcatctatatgtttccttgcaaagaaaaaaaaaaaaaaaaaaaagcaagcccaagcactagtaagaaaaagatttgcaatgtttcatgaaaggagtagatgagtgaagcatttatttgtagatactgggttggatacctgtgcaaagaagaagaggtcaataataaaaattgccaggggatttcttggaacttaacaagctgaattaaatatagaaatgtcaggaaatcaaggcaggaaatactcacttgtggttaggcagacagggcagggttctgagcttgagatggagcaaacagttgtggtgggtgaagttcacatgctttagagctcagctgtcctagtaaagaagcctaagagtctctaaagctcttatgagaagatggattttttttgcctagattaaaaggttaaagaattgctttaagttggataaaataaagctaaatgtttaagcaagttgtgaaaggtttatgaaaaaattaattaaaatatttttgtgtgtaaacatattgactaaagttgaaggggtataattcagcatttctgtaaattgagcattgaaataaaaacacaatgggtttctcttagagcactaacctgctctttaacaaaaattgtaaagggttatagaaagtctataaaaatgttaccttatggtcaaacattaaaattgggtaaatatgtctatcaggttttattaagaattaggtttaacattaatagtacactaatgtaaaggtgaaatttggcttatttggtacaaaaatcatacaggaagcattgtgaaatataaaatgatttttagctttctttgggctatatttctataaatatgttattgatgagggttccaaagttatgggagactcctataattctgctatatctcagtgtacattatcagtcataattataattgtcatgttaaattattgtgggccacagaggtaacagatttccttgtcaattgtgtctttgactatgactaccctaaaacgttcagtcacccatatacacatgttaccttgttttggccctctttagaaggtaattttataatcagctataaagccctaacaggtgctcttaaatgcaaattttgataactttggagattgtgacatcagaagagaggaaaaatgttcgggacacttggagagctaaaatgttcattgatatcaagcaggacaggaattaactgcatgaagtgaactaataggaggctgaagtgatctttttgactttttgcttaaaacgttgctgatcctttgttttgcttttcagagtcaaggcaaattttcttttgagctattgacagcttttaacgattaatcaaaatatactcctatgaacaccatttggagcattatttgtttctctctacccgatttccccagaatttggaaactatttgtgggtattcttaatttatggcaatatagttatttgcataagtgcaataagaatgtgttttctttggtaacaggacacaatttgaaaaactggttattttaccaaggttttgaccagaatgctgtgctttcctttaaggaatcaaacttgacttgtggagctaataaagcctttggaaaactgaccttatatcctgtgaacacagtccctgtacagggttactgatctgtgggaagaaaagaatgtcacattctgacaggtcaggaatcccaagttatcttgaaacttcaagaggacaggaattcacccaaccatatgtatttgatggtagaaatccatggcaggggctcagctttaaaaagtcttatctcagattccttctataaaacaaagtcccattaaaaccaattttaaaagcctatgtgaaaaataattattcttgctgcacctcgtacaaataaagtggcaaagcataataaagcaaattggtcctgtcgtaatttgtctttagtaaaaacgggaaactggggtcgggtgcagtggctcactcctgtaatcccagcactttgggaggctgaggtgggcagatcatctgaggtcaggagttcaagaccagcctggccaacatggtgaaaccccatctctacaaaaatacaaaaatgagccgggcatgatggcgggtgcctgtaatcccagctactcaaggggctgaggcagggaagcggaggttacagtgagtcaagatcgtgccacttcacgacagcctgggtgacagagcaagactccatctcaacaacaacaacaaaaaagggtaactggagagagggaagttatgtttcaaaaacttttggaaactatagtacacctgtttttaaattctagtctggcattcagtttttattattttctacagtttgggttaaattcgtatttctctggctacaagtctcctaaataatcttttcatttgtttcctttttctttccctttttccccatttttcttaattggaaatcactgaaacctaagctgtgctttcttaaagccctgtgaactgaagactagacaaccgaaacttctgaaggaagtagcagcaacctatttatatgtgttgctgttgcctactattatgttttagcaggtgctgcctctacacccccgaaacagagagtgctactgggaacaaatcgactttttccactccagtgctgcattcggtgccccataacgatgaccccctctcagcaggaagtagccagaaagattacaatgctccatctccctatgattcttgtgataaataaatatacaagcatgatagaaatcatgcgcaaattgacagtggggattgtggcaggccagatttcactaatggaggtccccatcacaactacttcagtactgactgagtggttaagttcagtatcaaaagctgaaagtgccagcgcctttctacaaaggctagaatgtaacaaaagcccaccaagggttttacctaggcctttcctgggccttacagcatgacaaaacaaagaaggaattcttaaccagacctgtttaggattaaacaaatttaattgggggtctgaagaaactcgccaggcctccacaaacaagttcattgggggtctaaaggaaccccccccaaacctctgtgattgagcaggagacaaggtcagggtaattgccccagcacctggactcatttagatttaagtaaatgtactgaggctccagagaaaggtctccaagacttagactagagttacagattaaaagaagttaatcacttatatctttagataaatgcacactgacacgtagacatacatcttagaaaatatataagctctggaaaaccttgtaatttacagttggtctggagatattttctgggccttctctctgtaaccggttccagaaataaaaaactctcttcctccccagtttatctgcatctcgttattgggccgtgagaaatagcagccagaccctgagtttggtctgggaacacactggctgggcttcctgcctggcggtagagcttcactgtcctccttcccagccaaaatgtggcccttgaaggcttcctccccaactgaccggttttgggttctaggtactcagggaacaccgtcttcaaggaggccattttcatactgttcctggtttgatttttctgaaattaggaaatgccccttgaggcatccaggattgtctttatttcccctgaagcttcccctcctgaagaaaaaagttctcaaacaccctcaggactcaaaccccaagttcaccctgtgaaacattcccatttcctaaacccaggcaggctcatggccctcagcctctcagaccccatggaaacctcctcccccacttcacgggttctctccatattgagagcctcccctcctcggcacacaacccagagactcaccccaacatgtgtagcaaatcaccctggaaacaatcatggctgaacgtggtagcccatgcctgtaatcccagcactttgggaggcccaggaggtggatcacctgaggtcgggagttcgagaccagcgaggccaacatggtgaaacctcgactctactaaaaatacaaagttcactgggcattgtggtgtgtacctgtaatctcaactactcaggaggctgaggcaggagaatcacttaaacctgggagacagagattgcagagagccaagatcgcaccattacactccagcctgggcaagaagagtgaaactacatctaaaaaaaaaaaaaaaaaaaggaaaaggaaaagaaaaaaaaaatcatgaggcaacattgcatttaacaatattttatttatcaaaagacacttgtctttctcaggtaagtgaaggtctagagatgaaacgagtcccgatgtaaattgccccatgggcattgctgagatcacaagatcatcactgcagcatgcagcacaatagtaaatttctcaggatggaagttcaacaatccaaaaggtagtattttttttcatgatgctcagtccatcatacgaaataaaaataaattccttttcatgatcatccattcagtagaaaaaatgatagtaaatttgttctcatgaagatttttaccgtaacatataggatttatcgttattattattattctttgttttttgtttttttgaagcggagtctcactctgttacccagtctggagtgcagtcgtgcgatctgggcacactattaacctccacctccagggttcaagcatttctcctgcctcagcttcccgagtagctgggattacaggcatgcgccaccacacccggctaattttcgtatttttactagagatggggtttcaccgcattggtcgagctggatttgagctccggacctcgggtcatccgcccatctcagcctcccaaagtgctgggattacaggcgtgagccaccgcgcccggcctcaatttatcattattcacgcatccacaaactgggttcttatattttgtacgtgattttttccattgaggagagatatctgtgcatattcatgctgctcatatttcatccacaaactcggttcatatttcatccacaaacataattttttccgttgagaagagatacttgtacatatttatgctgttcaaattcacatttcatcattcttttacaagaaatagataatgtattttaaggttttccagtggtattacagatattttactgggtgtatagatagaaattaaaccaaacttctttgttctggccgccagtcatgcatcctgttttcaacatagttcacatacaactggttgtgtaaaaatgaaattattttgtttagtacaatcatcaacagttggttgattagatttttaattatcaagttaatcattgtcattatgcttctcatcgcactcgtcattaattgctgtgggaggaaatttgttatgttccctatgagagggtgtatcacaaattcaaataagaattcaacgacaatggactgtataaaggaaataagcaagtccatggaaaacatatttttttccggaaaggattaaaatatttttaaaaaggaattaaaaaaaaattgggcacggtggcaaatgcctagagtcccagctgctcaggagatggagacagaaggattgcttgagcccaggaataagttggaggctgtagtgaacagtgattccaccactgtactccagccagggcaatagagggaaaccctctttctaaaaagacaaaaagaaacaaaacaaaacaaaaaaacaccacatcaaaaaacccaacaacaaaatgaaaaaccaaataacagcaatacaattggagctattcgatccaaagaagtaaatgaaacataaagcaaataaaagagaaaagctaatacctgtgtcctgcaggactcagtccaagttctgctctgactccctcctggtgagccaccccttaaaaagtcacttggggcggggttactttgacagacagtcttctgtcaaagagggaggcggtaaatagcacttttttttttttaatttaacgcctttccaacaaattagcggctatgttgtctaagagtgcaaatgtcagaggtgggtacaggcagcaagaccctccccacaggggcagcagaaggaggaatgactaagggaacaagactttagtgtgctcaactacacaggacaggaaacagatgctttttacaaaagctggtggacttgaaggcagaatattttcaagttcctgtaactgcgaactatgacctgtagcctgtgagagtgactttctgtggcaaaggagcttttgtgaatgtgaggaagttaattatcttaacagtgggaggttctcccggcttatctagctagaccctcgtgaaatcccaagtgtccttaggaaggggaagcagagagagatttgagtccagaagaggaagaaggtgatgtgaggcccagtaggggaacaaagggcgatggcatgtaaacacttagcccccagaagtgggagagggctggggttcatcacaccagaatccctaacaatcagccttattttaattacccttgaaatggaaggaggccttagagagccagaggcttggaggggcaccctctgctgcatacacagatcccaactgctgtgggctccaaataattgcaccagggaaatcacaaattatcaaaaataaaggatgtaaagcttttaaaaaatattaaaagcccaacaaataaaaaaagttctaaatctataaaattgacctcagtctgtatatttagatgagtcatgtgtatatagcgtttcacttcaaaatatatgataaatctctcattcattggcttaaaaataaacacttcaatcaagtctttatcagaaaaattgaaacgttaactcaattgccttttagttcatgtgactttacaaaacttaaaacaataaagtcagttttaaaaattattagtaaagtaaaagaaaaatatcttcacaatgtagacattttgtccacatgagacatgtgaaatattgccattactaaatatttgcaggtcaaaaactgtttccaaaacattttaaataatcatctggcctgtctgttttagagcattcaattctagctgaggtctggggacatgtgaaaggagccacggcccgactccgtgctgggaagagtcagacattttccacagctctgtcctttgctgtgggctctgcaactcctaccaattaaaattgcttacgtttttgttttatttttactaaagaggggttcctaaaagctaacattatactgagtatatgtaactaaaactactaagaaaacaatttcacaattatacaaatgtgccaagtaaatgaaaaaataaactgtattttaataaaggttataaaaagaaaaacatatagtggtgtgaggactgtctcaggtcttcactgagcaagggatcatgacattctatggcggacagctgaccttggctttctgctcctcttgattatgtctactaagtgacatacttactctttttccacctgtcttgcctctaagggtaacaggttttatgagatccctcctagtgctttgcaggtcagcctccctttgctgcattccaattttactgcctataccctccagctggcttttgatgacaaaagtcctggtcccagccattctcagattctgtcatccccgtgggcactatggagctcagcactatgggaggttccccaaaaatctcgttttctatgaggaatggccaccacctgcatctcagtgatgctagtgacccctttcctactcctgtgctcactggtcctcatgaagatcctggttggtctgtagccccctatttttcctattaaagagaaattacagtaagacccatttgtgtgcaaaatcaattttaggcttattacacttggcctgataatttgcataaaatgcagcaagaattcatcggccatataggctacttttgagttaattttcctgggtttttacctaaaaatatactattttggttagagtcttgtgaaaataaccaatgtgttcaattgttttattttaaaaggctcttactgaacactataaatatgtataagttgaatatacaaactatattgtcataaaatcacaacccaaaatgtggagaacgcagagggaaaggtaaatttgctcgcaaaaacatacttcacccaaataactggaaaaaaaaaaagactttcatgacccttctttaaccagagcagcagctttcaaacaaggtgtttgccttggaaatgccattcacaagccaaacggcccttgagagctgtctgtcaggcactgtagaatctagcagctcctcacagagttagaaatagtttcaggaaagagattccctgcttttagtaactgcactttatattcccagatagcgagattgtatgtaaaccatttttatcttattctggaactcttttgggtactttttttttttttttttaaatgatggagtctggctctgttgctcaggctggggtgtagtggtgcgatttcagggtatgagaaaatgcagctggacctggctctttccaggaagaccctcacagccaaggagtccaaagcctggggttttcatctaattccagtgtgactggggtaggagcagctttggtgctgggtgtgtgtgtgtgtgtgtgtgtgtgtgtgtgtgtctatgcctgtgtctgtttagggtgttaggctcgtggttgtctagatacaaatgtcccagggctcaggagccccagggttatgtcaggggcaccagatgaaggtgtcaacagaagttagggcacaagggacaaaggtgagagcaaggttagattcatttaggtgcaagaaatcatagagggaggagggagaggaagccctcctgctaccaccgaggaagaagcgcagcttaaggcagaaagcctgtccggagaggaagtgagtttgagggcagggctctctgggtaaagtacggtctgggacaccagcctgggggaagggtacagaatgcagagtggcctggcgtggggactaagaacagaggagagcagctttcactgggagggtcagtgttttcagtgtccagcactgagcaaggtgagatttgggcagcttgctgtgaaataaggtcaggctctggcattgtccccattgcgtgtgtgtgtgaggggcactttgggagagtgaactctccacctccatcctctcatacgtccttcaaccgagcttgccagttaccctgattccaaggagatctatttattgttgacaatactggatcctagcagaggctgggtaggagcctgggcacaagcaagtggaggagggggcctgggcctgaaagacctgggaggtttgagagaggacacagcccacagaatggagcagatggggtagagtcggcaagcattcagggctcctagtaagttggacaatggagaccctgaaagatccagtaaaacggggagaacaaacaggtccccaactcacatccttgcagtgcctggagcttcagactccagacaggtggggaaggaaaattgagggatgtgaacatgttggagaatgtcgtgccctgaagaatgaagaaaaggggggtgaggaatgagagcaggaacggcttccagtgcctggtgcccaggagaactcagaaaatgggtgtggtggagaggaatcgaggaaccggaagtggtggaagtgtgcagggcccctccgagatcactgtgactgccaggcgtcctccctggctggagagcttcactgtcctccttcccagccaaaatgtgtcccttgaaagcttcctccccaatggactggttctgggtcctatatatttgaaggggtggcctgcctctccacacctgtgggtatttctagttgggtgggaggagagacagagaaaagaaataagacacagagacaaagtataaagaaacaacagtgggtccaggggaccagcactcagcacaccaagggcctgcaccggcaccggcctctgagtttcctcagtttttattgattattattttcattatttcagcaaaaaggaatgtagtaggagagcagggtgataataaggagaaggtcaatgaaaaacatgtgagcaaaagaatctatatcataattaagttcaagggaaagtactatgcctggacgtgcactcaggccagatttatgtttctctccacccaaacatctcagtggagtaaagaataacaaggcagtattactgcaaacatgtctcacctcccgccacagggcagcttttctcctatctcagagttgaacaaatgtacaattgggttttacaccgagacattcagttctgaggggcaagcaggagacagtggccttcctccatctcgactgcaagaggctttcctcttttactaatccacctcagcacagaccctttatgggtgttgggctgggggacagtcaggtccttctcatcccatgaggccatatttcagactatcacatggggagaaaccttggacaataccccgctttcaagggcagaggtccctgcggctttccacagtgtattgtgcccctggtttattgagactagagaatggcaatgacctttaccaagtatactgcttgtaaatattttgttaacaaggcacatcctgcacagccctaggtcccttaaaccttgatttcatacaacacatgtttttgtgagctccaagttgggtcaaagtggctgggtcaaagtggctggggcaaagctacaaattaacaacatctcagcaaagccattgttcaaagtacaggtctttttcaaaatggagtctcttatgtctttcctttctacatggacacagtgacagtctgatctctctttcctttccctacatatattcatggaccacagtcttcaaggagtccatttcctcactgtttttggtttgatttctctgaaattaggaaatgccccattgaggcacccaggattgtctttacttcccccagagcttccactcctgaggcaggagcttctcaaacaccccccaagactcaacacctaatttcaccctctgaaaccttcccatttcttaaatccaggcagggtcatggtccttagcccctcagatgctgtggagaccttctttccctttcatacattctctcaagattaaaagccacccctcctcagcacacaccccagagactcaccccaacatgcattgcaaatcaccctggaaacagtcataagaccacactcatttaataatattttatttatcaaaagacactctttctcaggtaagtgaagttctggagaggaaaagaggagtcctgatgtaaattgccctgcaggccttgctgagatcacaaggagattgttactgcagcttgtagcacaatagtaaatttcttctctggatggaagttcaacaatccagatcgtagtatattccttttcattatgctcagtccagcaaatgtgatgataacaaattccttttcatgatcatccattcagcagagaaaatgtttgtaaatgtgttttcatgaagatgtttaccataacatacaggatttaccattatcaatgcatccacaaactctgctgttgttttttatacataattttttccatcgagaagtgatagttgtacatattcatgctgttcatatttcaaccacaaactctgctggtttttttatacgtaattttttccattgagaagtgatacttgtacatatttgtgctgttcatatttcatgtttcatcatccttttacaataaataggttatattgtattttaagtttttctaactgtagtgcagaaattgtactgggtgtatacatagatatcaaaccaaatttacttgttctggctgataatgcatcatttatttcatagattatgtatttctttgacacatttcacgtacaactaattgcataaaaatgaattttcttttagtatagacatcagcatgtgcttaattcggaatttaattgttgagttaaacatcgtcattgccttttccgttgttattaattgctctggtgggaattttgttatctcatacataagacagtgtgccacaatatctcttaaaatttcaatggcaataaactttatatttaaaaacagggaatctatggaaaacacatttttttctaaaggattaaaatatttttttaaaataattttctaaaaagttaggcacggtagcaaacgtctagagtcccagctactcaggaggctgagacaggaggattgcttaagcctacgagttgggggctgcagtgaactgtgattgcaccactacattccagccagggcaatagaagttaaccctttttctaaaaaaaaaaaaaaaagaaagaaagaaagaaaaaaagcaacaacaccaaaacctcaccaacaaaatggtaaagaaaaaaaaaacagcaatacaatgtaagctatttgatccaaagaagtcaatgaaatttaaaacaaatgaaagggaaaaagtaatacttgagtcctgcaggactcagtccaagttctgctgtgcctccctcacggtgagccacccctttagaagtcacttgggtcataagttaacccgataggaagtgtcctggccaatgaactagggaggtggtaaatggcaccattttaaatttaaattcacggccttttcaacggatcagtagccatgttgggtaagagtgcaaatgtcagaggtgaaaagaggcagcaggaccctcccctagtgcttgggcaacagaaggtggaatcactaaggggacaagactttagcatgctcaagtacacaggacagaaaacatgctttttacaaaagctggtaaatatgaagagggaacattttcaagttcctgtaaccaagaactaccgcctgtaaccggtgaaagtgactttctatggcaaaagcgtttttgaaaaggtgaggaagttaaatatcttaatgttgggaggttcttctggtttatctggctagaccctaatggaatcccaagtgtccttatggagcggggagcagagagagagatttgagtccagacgaggaagaaggtgatgtgagtctgggtgcgggacagggggagaatgatgctatgtggggatctgggctggggaatgacttagctgcatgagcggagtgacttagactcctgaactagaagaaatctagggctcatcacctcagcagccctaaccatcaaccttatttttattacaggtcttccatcgacggactccctaaaaagccagcggcgtggaggggcgccctctattggacaaatagatcttgactactttcggccctcaaatagcctgactaggcaaataacaaataataataatttttttttaaatcatggaaaatattttaaaaaacaattaaaaagttataaatctataaaatctgcttctgtctgtgtgtctgtatatttagatgtctcatgtgtacataatgtttcactaccaaaatatatgatgaaaccctcattaatcggcttagaaaactaaacacctaaatattttctcagaaaatacaaaaactttaactcaaatcccttttaattcacctgactttaaaaatctttaaaaaataaagcatgctttaaaattattagtaaagtaaaattagaacatcttcagaatttagacatttggtttaaattatacaggtcaaatactgcccttagtaaatattttcaggtcataaacaactcctgtaatcttttaaataattgaattacatgtctgttttagagctttaagttctagctaaagcctggggacaaatgaagggcaccatgccccctctctgtgctggaaagagacattttctacagctctgacccttgcagtaggctttgcaactgctacctatcaaaattgcctacatcctaagtttattattaaaaggagttgcttggagttaacattataatgaatatatgtaactaaaactatttctcatacaaagtatatgaaaaagtagaatgtatttttaataaaaagttataaaaagacatgaacatgtagtttttataaaaaacagtaattttgtctagttttgcagttctaaaaagttatgttaaattcaaaaataaaaaataacaagacaagactcaaggtttaaataagttgtaaaagatttgtaaaaattagttctataaaaattttacaaaaaaaagcattggttaaaatttaaggaattattttgtttttacagaaattaaacattcattaaaaacactctgatacaaggccttaatttgggttcatgtatcagaatagcagggttttcttagaatattaatctattctttaaaagaactatgaatgttatgcaaactttataaaaatcttaccttagagtcaaactgattaaaattccatagattttacgtaaaattttattaaaaattaacttcaacaaaaataaaatttgattttctcctttaaacaaaagttttgcgtaatattaaataataaagcatttttgtttaccttttaaactataaacacacacacacatacacatacaccaacactaaagtcagctgacctcatactgtctttattggatattcttgtttaaaaaactatcttctttggaaaataaagttttttattttaaaccatattttaaattatcattttgactaaatccataacatacagtgatctgtaataattctattttataatatcaagtgttttgaagaactccaggaacagccatgagagaacactgtggtttagtaacactttatttcctcagtttgaaaatagttgtctttcttggggaggccggtttcagcagatgaaaacaagagtcatgatgaaaattacccagcagtggttagtgtgaccataggaacattgtcatcaggtcagcagaaaacatatcagcaaatttttctcatactggcagtgtgtaggggtggatgtttacagttcctgaagccccagtggtcgtgtggtcttttagttttgccatttataggcaacttgtggtaactagctcaattagacacattccttatcacaaggacagagggctttctgtatcctagggttcttgccttggcattccagaagaatcaggtcacacgtggacgtggagaatgagtgcaaggttttattgagtggaagtagctctcagcagatgggggagccagaaaggagattggtttctccctggattggggccgttcagcagccctggctctcctctgactgccccaggcaaaatccacatcgttctataagtcggtgccctgctggtgtgctggtgcctgttgtcatgttcctcttcatgtccagccgcctgtgtgttcctccgctgatgtgctcctctcgacgtcaagcctcctgtgtgtctgactgctagggtcttggggtttttataagcacaggatgggtcttagcaggccaggatgatcttgggaaagacaacattcggtcaggaaaacaaaaatgcctgttgtcatctaggtccgtggggacaagcccaggtgtggagcttttagccagggaccacagcctcctgtatccaacacttcccttcaccttttctatatcattcaaagggatcatgcccttcccatcccagcacttcactttcatgtcatttgccccctctgaagaggtacatctaactgccattagaatatggatgatgaccagtcttagctgcttcctgctgaaagggggcattgttttgggggaaaacggcagtcagattcctcccaggggtctctataataaaagatcgaggtggctactttcaggaggtcctctaatgtactatctggtcccaagtcccatttctgcaacctcctcctgatgtcaggagctgcctgagtaataattttatcctttaggattatctgtccctcgattgaattaggagatagagaggtgtgatttaccaaggcctctcttagcctctccaggaaggcagtgggattttcatcaaatccctggttaattatggacaacttagtataattgagaggcttggtcttagacctacgtaagccctctattatgcacacctgaaagtgtctcctcttccagtcttccatctcattattgggatcccatttagggtccttcactggtgctacttctcttccagttggataatattcgctcccttccctgatgctataggtgatgcaaagctcatccccaaatctctctgctgctggcagagcagcctgcttctcagtgtctatcaggttctgactcaaaagtaacataacgtctctccaggagagttcaaatgttagggtgaaattctggaaagcttctatatatctatcagggtcatctgaacacttgcccagatctcccttaatttgctttaagtcttgtagggaaaagaggacttggaccttactgggcccaaattcactgggcatctgtaggaggggcaagagtgagactgggcttgtttgggatgaagatttctaggaggggccaggtgagaggctgaagctggatacggaggttggggtggacccagaggagcagggcttgagggagctggcacgtcagctgggggtgcgtctgggactcgtgtctttaattccctgggcttgaccctggcagccttccccgagacagcaaacaggagggctggaacaatcctacatgtcagcaaaggtctggattgctttgcaaggtatagaaagcctgcacatttggggcctcagaccatgtgtcctcacatccagagaaaagttctaattgcaggatggtattgaaatgaatggtcccttcctgaagccaagccagtccttcctgtaaaccataatttggccaaacctatgtgcggagggctatgagatgcttttcctctggattctgagggtcaaaacagtcccaatggttcaggatacactcaaggggagtacaagctgggggtggtgaggagaactggctgcccattctgaaagacagggaatagaggtgttcctcatttcccttccttcttttggcaaaaagctcagggtgtgatggggagggaaagcaagcatcttcacttcactttccacctcttacccctgcgccctggcaaccttggcaggtgccggccacaggtacaaatgcggtatgtacccatgaagcagggagaacctggagattaggaattaactgccctcacctatgtttccttttctccctgctgttgaaaaactttgagttccctgggcctttttatcccatgaggcatggcctccttctgtgggatggggttcagtcagcaggaattggtcctgtccatttacattgtgcctgttgcctggctttgaattcctcagacctgctttctctttctagggcctcagcctgaagcttggaattgagtttgggactgaaaaagcatttcagaggctgtttatatccatttagtgcctcaaataagccctgctgaatttgcaattatcagccagcaggggtcactcctctgttaacttccctattagaaacagagcggtggggattctcacttagaaaagaaaaaaagagaaaaacagttaaagaggcaaaaagtggggaatgctgggggaagaaccccttgcttagtgcaagtgggcccctctaatccttataactttcccatccttcccccagttcagaccaggttgaattccttggccatggaaggaaaggttccattgatgcagtgggtgagaagcactctgtagggtcctggctaccatcggttttctcacacccccctcatcccaggcagtggagggagacacttctgcgacattgctccccctgccccttcatggctattgggtgtggcctttgcctgctgcaggcatgcctaggtgctggagctgggagggaaaagggtaaggagaggtgccctggaagccgctcatgcctggggctgtcaaggtggaggcatacatggcacctctaggaaaaattggtctgatttgcacctttggcggctgagccaaatgctcattttacttagtaacattgcctcagcctgtagcaaaactcttaacattataaaggaagagataagatccatttcaaataatgtgtgagagagaaaagagatgaaaggaaaacagagtcttttacctgcaggaaagggagagaagtggcagagttttggaagaaaggcaggcccaacagtttcccattcactcacactcaccttccgagatcccagacgagccaccagttgaaatgggaaaagtttccttgtccccctcacaggaggtggagtgggggtgtggcttgcttctttagtactccgctgctcaaacctctagggaagcatacagactggcaagttgtggggctacaaccccatggcagcatctaggggtagatgtttacagctgctgaagccccagtggacatgtggtaccatgtgctcttttagttttgccatctataggtggctttgtggtaaccagctcaattagacccattccttaacccaaagacagagggctttctgtatcccgcggttgttacctaggtgtaccagaaaaatcaaatcacacgtggtcttggagaatgagtgcaaggttttattgagtggaagtagctctcagcagatgggggagccaaaagggagaatagttttcccctgaagtcgggttattcagcggcccaggctctcctctggctgccccagccaaactctatgtcaatccattggtcggtggcctgccagagtgctggtgcctgttggtggattcctctcagcgtcgagagtttttccctctcaggaaagggagagaagtggcagccacccatgtgttcttgcactgatgtgctcctctcgacgtccaacctcctgtgtgtctgcctgctagggtcccagagtttttttaggcacaggatagggcatggtgggccagggtgatcttgggaaatgcaacatttggtcaggaaaacaaaaatgcctgtcctcatctaggtccaggggcacaagcccaggtttggagccctagccagggaccccggcctcctctacccatcactttccttcaccttttctgtatcattcaaagggaccatgcccttcccttcccagcacttctcttctgtatcaataggtgatgtttttaaaatttcccaactctagtgcaggcatggtactagacatatacatagaaataaaaccacacttattcttctggctggcaagacatagtatttttgccaaattatgtgttgttttgaagcattttatgtacccctggtcatataaaaataaagctattttgttcagtacaaacagcagcattttctggattagaaagttaatcatcttaaaagatcatcacggatttttccattgcactcatcactaattgctttggcaaaaaatttcttatctcacgcatgacaaaatcagccgcagtatctcctagtaatttaatggtgatgatctttataaaggaaataagcacatcaagggaaaacataattttttttaaaaaaagagtaataaaactttttaaaagtcttttttaaaagactgcttttctaaaatagtaaaataaaactccaccaataaaaccaccaacaaaacagaaaagaaaaaataatgatatgatcggagctatttgatgaaagatggtaaattaaatttaaaatgattagaagagaaaaagcaatacctgtctcccgtaggtctcagtccaggttctgctatgcctttctcctggtgagccacctatttaagagtcgcttaaagcatatgttaatccaacaacagcagattaaaaaccaatgcaatctgaactatttgatctaaaaacataaataaaatttaaaacaaataaaagagaaaaagcagtacctgtgtcctgtaggtctcagtccaagatctgctctgactcccttgtggtgagttagccctttagaagtcacttggggtggggcatatgttaattccactaacattggttctggccaatgagtcaggaaggtggtaaatggcaccttttcttcttgctgatttctttcagttcctttggagtctggacattagtcctttgtcagatgcctagtttgtgactactgtttcctatactgtgggttgtgtgtttaccctgctgatatttcttctgccttgcagaagattttcggtttcattaggtcctattgatcttattctatttttatatttttgcgtttgcttttggggcattagtcatgactacttggcctaagccaatgtctagaaaagctttttggatgctatcttgtagcatttttagactttcaggtcttagatggaagtttttatatgctttgttaaagatcaggtgactgaaagtaccgggctttgtttctcggttctctattctgttccattgctctatgtgcctatttttatacttcctgcaccatttattgaataaagtgtcctttccccaattagtgtttttgcatactttgttgaagattagttgtctgtaagcatttggctttatttctgggttctctattctgttccattgctctatgtgcctatttttatacttcctgcaccatttattgaataaagtatcctttccccaattaatgtttttgtgtactttgttgaagattagttgtctgtaagcatttggctttatttctgggttctctattctgttctattgctctatgtgcatattttataccagtatcatgctattttggtgattgtagccttgtagtataatttaaagcctgccttcagatttgttctttttgcaaagtattgctttggatatgcggtcacgtttttggttttgtataaattttaggattcttttttctagttctgggaaggagaatgatgatattttgatgagaattctactgctctgtagatggctttggagagtatggtcactttcacaatattgattctacctattcataagcttataatgtgttcccatttgtttgtgtcaactgtgatttctttcagcactattttgtagttttccttgtaggaaacttacattaacctacttggttaagtatatttctaagtattttacttattaaaaattctcagggaaatgcaaagtaaaactgaggtgggaaattaaagaaaaataaaattaaaaagaaagggaaataagctttcttgtattaagctaacttgtcccagaggcagcaacaggcacagcccagacccaggaaaagtcttgataatattatttattgtattctggagactcttccagcactccttcaatgtagggagaagaaaaacaaattttcctttgttttatggtatgagtttatagattcttgttctctttaactagtaacttcaagtattctgttttatctaagaagtatggcaaaggtcatgagaagcctgagcaggcctgaactacagctctctaggcaccatagtgaagataaaccaatgcaagcctctttagagcaaaacctagataatagacatctgggttgcatagcaacagttatgtgcaatcctgagttatgaacctgttacaatttgattaactgtctttttcctgcctctgtatccctgctttcacaccactgtaagcttgcttcaagctggcccacccccttttgtgaagtgtgtataaaagtcaagtgctgtctttgttccaggccctgtctttggacgtgagtctgctgggcctgagagcactcaataaaagattctcctgttttaacccaaagcctctctctcatcctcctaaatcccacaacaaaaccacaatgagatgctatcttaatcttgctagaagcccataatttaaaagtcagaaaacaatagatgttggcatagatgtggtcaaaagggagcactttgacactgctagtgggaatttaaactagtccgaccactatggtaaacagtatggggattccttaaagaactaaaagtagaccattcattccagcaatcccattactggctatctacccaaaggaaaagaagttattccataaaaaagacacaagaatatggatgtttatagcagccgattcgcaattgcagtgatatgggaccaacttaagtgcccatcaacgaacgagtggataaagcaaatgtggtacaccatggaataatacttgataataaaaaggaacaaaataatgtcctttgcaacaagttggatggaactggaagccattattctaagtgaagtaactgaggaatggcaaatcaaatattgaatgttttcacttttaaatgagagttaagctatgagaatgcaaaggcataagaatgatataatggacttggggactcagggggaaaggttgggagggggatgaggaataaatgatgacatattgggtatattatacactgctcaggagacagatgcctcaaaatctcagaaattaccactaaggaacttttatccacataaccaaaaaccacatatattccacacactattgaaagaaacataaacattattttaaaaaataaagccacttttaaaattagcaaaataaaataaatatgtcttcagagtttagatattggatccaaattagacagatcaaatactgcctttactaaatattttcatgtcattaacaacttctaaaacctttcaaacagttttttgacatgtcttggaaccatccatttctagctaaggcctgggcacctgtgaaatagggccatgcccccccttatactgggaagagtaagatatttcaagactaagatgttttctacagctccatctttttctttaagctctacatcaaggacataattaaaattggttgtctcctaagtggtttactaaaaatgcatacttaagagttaccattataattaatatttgtatctaaagctacttaaaaattttcacacacaaatctgactgaacaagtaaaatatattttaagtcaaagtttataaaaggacatgagaacatagcttttatgaaaaaattagttttgtcaagtttagaggttttcaaatattttaaattcaggaaataaaataacaaaaagacaaaagaaaatggttgaacaacttagaaaaggtttgttaaaattcatcttataaaacaatctacatgtaaaaagtgggctaaaatttgaaagagattatttaggttttccataaattaatccagaaggggtaggaagtcttaagaatgaggaaggacaggaggaaggggaggtcatcctgacactgcagaggcagaagtgcagctgaaggtatgaaggctaagaggggaggggagtttgagtgctgctgcctggctgtcagagcagaggagggtcctgggcaccagacttgaggaagggatgaaaatgctgggcagacctgtagtgggcccttgagatggcagatagtggtttccagagagagggccattgttttccagtgcccagcactgagcagagagagttttgggcagtgtaaaaaaaaaaagagaacttacctctttctcgttttagaaaaagaacagtctaagaatatcagcagggaaactctcagtgcttcaaggggttaaacgcccttttggctttcttgtgttggtttcatcatagaggaggagaaacttcttggaagtgttcctaaaaacacaacacgtctgcttctcctttcaaaaaaggaagtgctaaaacacgaacactctagatccaaatattaatacggatgtctaaatgcttccgttttccaaggggcagaaagctaaaggttgtaacctattcatttcagtcaaagttggtgaaagggaagcaaaggaactgggtggggcttggaaggatgacgaagctcaagctcattggccagcaacctctctcctgggggcgggaggggtgagcatacgtcattgctttggcttctataaaatgaggaggactcaccgagtgtgaagagtccttctggtgattgcagctgagagcacactcacgacgttctgcaaggattctctgattatgattctgaagggaaaagcgatggaatggacagcagagattgtaattttctttatcttgaattacggaagaaagtatctaggacagaaatccacgacaagtccttggaaccagcagatctcttcgttcacggagacgttgacgtattctctattgaagaagattcttaccttcttactggacaaggttttgtcagttctgcgtgactggattgtccgggagactctgaggaaactgatgtcacatgtttttccaaagaagatgtttctggaaccaacaactgtgattgtggtttgaggacttctgagagttccagtacaggaaataagcagaacatcagctggaggctaaacggatccagacttcactcttcacttcccttcctattcagtctattgtgcctgctgactgagaagcttggctggtatgtgagcaaataaacggaactattcagaaggagatgttgacatattctgtattgaagaagatccttatcttctcacctgacaaggttttgtcagttctgtgtgactggattgtccggaagactctgaggaaactgatgtcacatgtttttccaaagaagatgtttctggaaccaacaactgtgattgtggtttgaggacgcctgggagttccggtatgcgaaataagcagaacatcagctggcggctgaagggatgcagcctccactcttcacttcccttgccattccatctattgtgtctgcctgactgagaagcttggctggtatgtgaggaaataaacggaattataaacaaggagattgtttctcatctacttcattctgttgtggcttttctattttggggttcagggtgtgtgacaaggaccaaggagatgaaaggtttcatgatggagaaagcccaggcaatcagattgaagagctatccacagggaatcttggctgctgaggggctgcaccctgcaacggactgaccatatgacagaaaagggttttaaaggctcaacttctggactgagaacccagagtaatttgggaacctcctctgtgaggagatatgaaagctgggaatcatgacatccctaggaatggaaggcacatttcctgatggaaggggtgctttggaaaacaggagcagagtagacacagcagccttgtggatacgggtgggcagcatgcatgggtgatgtgaacgtggagtgtttgtgatcgaaactcaaaatgtctgacaaagtgaaaacctagaaaccacaatgaggaggaagagtttgtgagggcaatcactctccccatgtgtgaaaatcgggggctcttaaaatctcatctggagaggtgcagtctaccaaactctgggactttagcctccccttttaaaaaaccgtgcatcaataccaacgtccgaaaccacagaaataacacctggcttgcatggagacaaggacaaaaagccgtcatgatgagttgttctgctcacttgctgcctctgttcagtgcacaggatattgtccacccactagcaggctactgcaagagaagtgtgcaatatgttccctatgtgccatatatgtgccatatggcccatatgacaactgagtcagaaaatatctgatgccctcagagttacactccacctggagcttgcccccagccatccaggacctaggctccctaccctgtccaattttctggtgttttgggggcttcattctctaaggtgtgcccactctttactcaaaccaaaacacccacatattcctgcccatgaacaaccaatcaaccacttctcagttccacatcctgctgttgggtctctagtggtgacactgtaactcccaggtcatagtggtgacactataacacctagctaaattgatgccttgtctctaggaggccatgggctcctgcaggtctcatctgactctctgtagccttccctgacaatgctcacaatacccaagccagagccacattgacagcaagctgctctcatcttacctttgccagacctggccactggaaaaggctgaccctcatcctgcaatgcctatacctccaacctttgtctcaagctggtgtcctggagggacttctaagcagaaaacagattcagactcccatcctctcctgaatggcctcatatccaattctcagaccctcagccttcattgtaaggacacttcatccatgcccttgagtattctgtctgcactgtgtattctgcaatagattctcctccctctgcgaccctcaactccttccgcagactttttgttttcttgatcatctaccatagtcttccactgggacactgccaagcccattctggagagtgagttgtgcaagtacactgccccccatctacctttcgggaggtgtatacacccttctttctcccaggtctggaggctttctattttcatcctgaggcatctccacctgctcttggattcttcaaattgacaaccaccagttaacaagaactatgtgtcaccaaatagccaaacaatggcaattacaaaaataaaattaatagctgtaacccccattagcaaggatacacaaatcaaatcagggatagtgggtgaggaagtctgcctaacattcaaggaaggattctgaagtgatacaaaatcattgcctttgctatctttagaatggacactttcagccaggcacagttgctcagcctgtaatcccagcactctgagagccccagttgggtggatcacttgaggccagcagcttgagaccaccctgggcaatgtgcagaaaccccaactctactaaaaatacaaaaatagccagttattgtggcacatgcctgtaatcccaactccttgggaggctgaggcacaagaatcacttgaatctgggagccagagtttgtaatgagcgaagatcatgccactgcactctagcctaggcattagagtgataatctgtctgtggaaaataaaaacattcctcttcaaagttttcttctttaaatcataaatgttggaattaatatatcctctttgaaactcactttcttcaagcttctttatttgatggtagtaaatctttgttaagctttatgaggcaagagtaatggaagaagcatattatatatatttatactctaacctcagtgcttgttctagcaagctcaggcatgcgtgaatgtgcccaggcatgttccagcccataccttatatcctttccttattgggaaatgctgttactcctataagcattcttgtaagcaacttcctctttttctttgtctccactatctttacctattgaggacagttttaggttcttagccagttggatgtagcatagactgtgaggtccaaccccagccaatggagatagcacacagcagtagcgacctcatgcttaacagataaatattcctgtctccctttgtttggggtgctctcagctgatgagcaacaccctttctaaagaaattaaagttgtcttgctgagaaaacttttggtctaaatgctgattcttccttgcagcactgaagaagaagcaattatttccaacactttctcatacacaaaaaaagaagaaggtggaagaaaactttcttgtgcaccctatccctcactcagaaagacaacagaaggctcctagtggcaagccctagaggattcatttcttttgggaaccctcttggctgggatactaggactcaggtcaaactcagcattttcagtgtgtgggaagtgtgcttgggtttcactgttacttccaataatgtgatttggtccttggggttcaccaaattttggtatggagtggtgaaccctgttaagtttaagtgtctataaaattaacaaagcaaaataaccattctgccccatggttcagagaccaaatattgtgtaggaaatgctttagcgagagaaacagagaagaataaaaaatgtcctcaagcgctgcattatttcttgttatcgtccagatcttagaggaaaggctttcattttccctcattcagtatgatattagctgtgcatctgtcatttatggcttttattatgttggggtatgttccctgtgtatgtagttttttcagggtttttgttatgaagtgatgttgaactttatcaaacgtttttcagtttcagttgaaacgatcatatgctttttgtccttcattctcttgatatgatgcatcatgttgatgatttccatatggtgcactgtccttgcatcctgggcatgaattccacttgatcatgacaaatgaatttttaatgcattcttgaattccgtttgctggtattttgttgaggatttttgcatcaatattcatcagagatattggcctgcagtttctttttttttcttttttctttgttttgttgtttgtttgtttgtttgttttgatgtgtctatgtctggttttggtatctgggtagtagtgttccatccccttttattttttagaataatttgaataagactggtgttggttctttaaatatttggtagaattccgaagtgaagtcattgggccccgggcttttctttagtggaaggctgtttattatggcttcaatctcgttacttattattggtctattcatgttttgaatttgttccttatttaatcttggtaggctgtgtgtatctaggaatttgtccatttcttttagattttcaaatttattggcacataattgcccattgtagcctctaatcgtcatttgagttcctgcagtaccaattataatgtctccttcttcatttttgattgtatttatttggatcctgcccctttttttcttacttaggctgcctaataatttcttaattttgttgaactttttcttttgtttgtctcgctctgccaccaggctggagtgtagtggtgtgatcttggctcactggaacctccgtctcccaggttcaagcaattctcctgcctcaccctcccaaatagctgggactacaggcaagtgccaccactcccagctaatttttgtatttttagtagacacgggttttcaccatgttggccaggatggtctcgatctcttgacttcataatccacctgcctcagcctcccaaagtgctgggattacaggcatgagccactgcgcccagcctaattttgtttaaattttcaagaaatcaacttcttctttcattgatttctgtattttttatttccattttatttatttaaactctaagctttattctatcttcttctcattttagctttggtatgcttattgcctctctagctctttaatgtgcattgttagattgtttatttgaagttcttcctctctacaccataagacgtaagcatgtcctcattatgtcataagatgtaaccacttacagctataaacttccttcttagttctgcttttgctgtatctcataggctttgttatgttgtgtttccattatcaattgtgtcagaaatttttcaatatttttcttaatttcttcattgagcaactgatcatttgggagcatatttttaaacttccatgtacttacatagtttccaaaatacctcttgtgatcaatttctagttttattccactatggttcaagaagatgcttgatattatttcaattttttttcacattttaagatgtgttttgtgacctaacatatggtctactttttttttttattaaactttaagttgtggggtacatgtgtagaccgtgcagttttgttacataggtatacacgtgccatggtggtttgctgctcccattaacctgtcatctacattaggtacttctcataatgctatccctcccctaacctccaccctctgacaggacctggtgtgtgatgttcccctccctgtgtccatgtgatctatttttgagaatgatccatgtggattagaatgctgtggaaaagactttggattcctaatatccagggagggagacgatgatattactttcaatatcacacgggtgtacacactctctgtgacattgttcctaatatccagtggaagagaggatgatataacacccagggagggagaggatgatattactcttaatattgcagggtgtgtacccatgcctatgatattgttcctaatatcaggagggggagaggatgatattactcagaatatggcagggggtgtacacacactctgtgacatggttcttaatatacaggggagaatgggacaatattactctcaatatcgcagggggcgtacaaccctgtgatttgttcctaatatacaaaaggggacagtatgatattgttcctaaaatcgcagaaggtgtacaacgccctgtgatattgttcctaatatccagggcgggagaggatgatattacccccaatatcacagggggtgtgcactttccctgttacattgttcctatgatccgagtggggggaaatgacattagtcccaatatcgcaggatgtgtacactactcccccatgatattgttcctaatatcaagggggagagaggaggatattactcccaatatcgcaagggaggtacatcctccatgcaatattgttcgtaatattcaggaggagagaggaagatattactctcaatatcgcagaaagtggacacccaccctgtgatgttcttcataatatccagggaagcagacgattatatgactttcaatatcgctgggagtgtacatcccttttgggatattgtttctaatatccaggaagggagaggattatattacttccagtattgcagccagtgtacacatttcttgtgatattgttcctaatatccagaaagggaaaggatgatattactcccaatattgcaggtggtgtacacccccctctgatattgttccttacatcaaggaaaagaaagaagaatattactcccaatatcgaagagagtgtacacccctcctgtgatattgtatttaatatccatggggaaagaggatgttgttactcccaatatcgcagggggtttacacccacactgtgatattgttcctaaaatccagtgaaggagaaaataatattgctcccaatattgcagggtgtatacaggccctcccccgttatattgctcctaatatccagcggtggagaggatattactttcaatttttgcagggagtgtgtaccccctctctgatatttttctaatatcaaggatgggaaaggatgccattactcccaatatcgcaggaggtgtacatgccctgtgatattgttcctaatatccagggaggtagaggatgatattactttcaatattgcaggggctgtacaccctctatgatgttgttattaatatttaggttgggagaaaatgatatttttcctaatatcctgggaaggaaaggatgatattactgtaaatattccagggagtgtacaccttcctaatattctaatattgttcctaatatccaggggtgggagaggattatattactcccaatatcgcagtgggtgtacacccctcctgtgatgttgtttctaatatccaagcgaggagaaaatgatatcactctcaataccgcagggggtgtacaccttccccatcatatcgttcctaatattcagagggaaagaagatgatgttactttcaatatcgcaggggttgtacacaacccctgtgatatttctcctaatatccaggaagaaagaggatgatattgctcccattatagcagacggtatacgcctccctgtaacattgtttctaatatcaagactgggagaggatgatatcacttccagtatcgcaaggggtgtacacctcccccgtgatattgttactaatatccagggggaagaggataatattactttcaatattgcaggggctgtacacccccgtgatattgttgttaatatttaggttgggagaaaatgatattagtccaaatatcgcagagagtgtacacacttccgataatattgttcttaatatccatgggggagacgatgatattacacccaatatcgcagggggtgtagtctccccttgtgatattgtccctaatattcagggaagtaaacgatgatgttagtgtgaatattccagggagtgtacaccccctttgtgatattgtcctaatatccgcaggagagaagataatattactcccaatatcgcagggggtgaacacaccccctgtgatattgtttctaatatccaagcgaggagaaaataatattactcccaatgtctcaggggatatacaccttccctatgatattgtttctaatattcaggtggaaaacgggtgatattactcctaatatccaggaagaaaggggattatgttactccccttatagcagggggtatacacctcccctgtaatattgttcctaatatcaaggctgggatatacgtggggggaaggatgatattactcccaatatcacaggggttataaaaccttctgtgatattgctcctaataaccatggcggaagaagatgatattactcctaatattgcaggaggtgtacactcccccattatgttgttcctagtatgcagaaaaggagaggatgacattattgccaatatcgcagggtgtgtacaccacccatgatattgttcctaatatttagagggacagaggatgatattactcccaatatcgcagggggtgtacacgcatcccctgtgatattgttcttgaaatcgaggggaaagagaattatatttctctaaatattgcagagggtgtacaccgccccctgtgatattgttcctaatagccgggggcggggggagataattaaattactttcaatatctcagagagtgtacatcccccttgtgacattgttcctaatatccagagcaaaagagaatgatattcctcccagtatcgcaggaagtgtacatttaacctgtaatattgtttctaatatccagggggaagagaatagtaatactcccaatatcgtaggggttgtacaccttttctgtgatattgttgcaaatatttagaagagagagagaatattactcgcaatatcacagggaatgtatacttcccctgtgatattgttctaatatctagaaaaagagaggataatattactcctaatattgcagggggtgtacacccccacttgtgatattgttcctaatataaaggaaggtcgaaaaacaaacggggagcccagggggaaggaaggcaggcgaggaagaggcagcgccggggcgccggagggagcagccgggccgcggaagcgcgagcacgagaccggtcgcggtcgcagtcgcatttttgccgttgtcgcggccgccgccgccgaggcttacccggggatgtctgagcccgcgcctcgcggcccccaagctccacgctgcgcccgctgtcccggcctctaagggccgccacgtccctgcggcgcgcgcaggcagaaagcggcttcgtgccggcggagggggcccgggcgggccgggaaaggctgccccaggccccgcgcctaccccatcaccgcggccggcgccgggccgggaggatgagcggtgtggggctctgaagcatggagggggttttgtacaagtggaccaactatctcacaggttggcagcctcgttggtttgttttagataatggaatcttatcctattatgattcacaagatgatgtttgcaaagggagcaaaggaagcataaagatggcagtttgtgaaattaaaggtgacagctttggaggggaccacccttgattggatacataaattctgttcattcagcagacaacacaagaatggaattaatcattcctggagagcagcatttctacatgaaggcagtgaacgcagctgaaagacagaggtggctggtcgctctggggagctccaaagcatgtttgactgatacaaggactaaaaacgaaaaagaaagaagtgaaaccagtgaatcgctgaaaaccaaaatgtctgaacttcgcctctactgtgacctcttaatgcagcaagttcatacgatacaggaatttgttcaccacgatgagaatcattcatctcctagtgcagagaacatcaatgaagcctcttctctgcttagtgccacgtgtaacacgttcatcacaacgcttgaggaatgtgtgaagatagccaatgccaggtttaaacctgagatgtttcaacggcaccatccggatcccttagtttctcctgtgtcaccttctcctgttcaaatgaggaagcgttctgtcagccaccctggttcttgcaccagggaggagtagccactgtataaaagaaccagtatctgcacttcaccgactctcccagcgacgccgaagaacctactcagatacagattcttgtagtgatattcctcttgaagacccagatagacctgttcactgttcaaaaaatacacttaatggagatttggcatcagcaaccattcctgaagaaagcagacttatggccaaaaaacaatctgaatcagaagatactcttccatccttctcttcctgaagaaactgtagtgtccaactttctctaagtattgctatgcaaaagctgctgtaattgaactattgttatagggagtagttttttcccttaggactctgcactttatagaatattgtaaaacagacaaacaagaaaacaaaccacatacttttgaagcgtgttttatctttatatagtttgtttgcaagagtattttcctaataacttcacagtatgaatgtgcatcttttttttctttttttaacaaatgatggtgtaacattttgacatccataaggacaaatgtagatatttttctaaaaaaccgtgaggggactgacagcttggtcagggtgtattgtagcttataaacatgaaatcttacaaggtttcagtttgacagaagtgtgatatatgtaacttgtgccatggaccaaatggtcactttaccacagctaaaaatgagttatgatagcagcttgatggtgattgcattgtattcctttaatcaaaaaggaaacgcaatattctaagtatctttagcccaaataccatgacatattgagcatctttaaataaccagactgtattgtccttcatatgtgaagttgacactactgatttgtcaataccaaattttgggttaaagtgtttaatttttatttatttattttcttgttgcctcaaaagatgattgcattctaacttttgtgacctaccaaatttaagatgtgtatacattgttctttacgttgttctagaaaagagattttaatgctgtagtgacttagctcacttacatcagagaaataaacaactttcaatggaaaaaaatatatataaaggaaggaagaggatgatattacttctcatatagaaggggttgtacaccccccttgtgatattgttcctaatattcagggagggagaggattatattactcccaatatagcagggagtgtacacccccccccccgtgataatgttcctaatattcagggaagcagaggatgatattactttcaatatcacagggggtgtgctgtccccctgttatattgttcttaatattcaggggggagaggatattattatgcccgatatcacaggagaagtacaccccacaagtgatattgttcctaatatccaggggtaaagaggatgatatcgcaggtggtgtacacccctccccgtgatattgtttctaatataaagaaggagagagcatgatattactcccaatatcgctggaggtctacaccccccttgtgatactgttcctaatatccaggaagggaaacaatgatattgctgtgaatattccagggggtgtacacccctttgtaatattgttcctcatatccagggggtagagaggatgatattactcccaatatcgcagggggtgcacggccccactgtgatattgtttttcatatccaggaggggagaggatgacattactctcaatatggcagggggcgaacaccccctgtgatattgtgctagttaggttgggagaaaatgatattactcccaatatcgcagggggtgtacaccgctcctgtgatattgttcctaatatccatgacgggagaggatattactcccaatatcgcagggggtgtacctctcccctgtgggattgttcacagtatccaaaagggaagaggatgatgttactcccaatatcacagggagtgtacaccaccattgtgatattgttcctaatagccagggaagaaaacgatgatattattgtgaatattacagggggtgtacacaccccctgtgatatggtttttaatatacaggttggaaaaggatgatattactcccaatatcacaaaaggtgtacacacccccccatgatattgttcttaatacttcggtggggagaaaatgatattagtctccatatcacaggggtgtgaactcctccggtgatattgtttttaatatcaagaggggaggagatgatattgctttcaatatcgctgggggtgtacatccctcctgtgatattgttccttatatccaggcgaggggaaaataatattactcccaatagtacacaccccatgtggtattgttcctaatactcagggggaaagaagataatattactttcaatatcacagggtttgtacacctttcctgtggtatagttttcaatatccagggggaaggtacatgatattactcccattgcagcaaggggtgtacacacctcctgtgatattgttcctaatatccagaagtggtgaggatgatattactcccagggggtgtacaccccacctatgatattgtttctaatatccaggggaaaagagtgtgatattatgcccaatatcgcagagggtgtacacttatcctgggatattgtttctagtatttggggagggaggagaggatgctattattctcaatatcgcagaaattgtacacccccgctgtgatattcttcataataatcagggaaaaagaggatgatattactaccaatattgcagggggttacacttcccctttggtagtgttcctaatatccaggaagaaagaggatgatattaatcccattttccaggaagtgtacacccaccgtgtcatgttgttcctaatatccagcagggaagaggatgatattactcccaatatcggagagggtgtacacttcccctgttatattgtttctaatacccagggggaagaaggatgacattactgccaatatcacagggtgtgtaccccaccctgctattgttcctaatattcaaaaggaaagatgaaaatattactcccaatatctcagggtgtgtacacctctcctgtgatatcgttcctaatatccacaggaagagagaatattactctcaatattgcaggggggtgtacacccccctgtgatattgttccaaatattcgggcggggagaggatgatattagtcccaatatcgcagggggtgtgcaccaacctgtgatattgttcctaatatccatgcgggggaggacgatatcactctcaatgtcgcaggaagtgtacacctctcttgttatatttttcttaatatccaggagggaaaagatgatattactgccaatatcgcagggtgtgtccaccccccttttatattgttcctaatatccaatggaaaagaggatgacattgctctccatatcccagaaggtgtacaacgcccctgtaatattgttcctaatattttgggggaagagaggatgatataacttataatatcacaggaggtgtacaccacccctatgtattgttcctaatatcctttaagggagaggatgatattactcccaatatctcaggtggtgcctattccccctgtgatattgtttttaatatccaggggaagagagtatgatattacgcccaatatcgcagggggcatacaccctctctgagatattgttcataatatatagagggagagaggatgatattacttccaatatcagaggtggggtacaccccccggttatattattcttgatatccaggaggggagaggttgatattactggatatatagcagggagtgttcacatcttctgtgatactgttcctaatatccagaaaagtagaggatgatattactcccaatatcgcagaacgtgtacacctccctgtgatattgatcctaacattcaaaggggagaggatgatattactcaaaacatcacagggcatgtacactcccctgtgatattgttcctagtatccagaagggagcaagataatattactttcaatatcgcagggggtgtacacccctctttggtatgtttcctaatatccagaaggaaagagggtgctattactttccatattgcaaggggtgtacacccccctgtggtatggttcataatatccagggagggaaagggtgctattattccccatatcgcgaggcatgtacaccctgctgcggtacggttcctaatatccagggggaaagaggatgctattacttcccatatcgcggggtgtgtacacccccgtgtggtatgttttgtaatctccgggaacgaagagggtgttattacccctcatatcgctggaaatgtacactcccctgtggtacggttcacaatatccaggggattgagggtgctattactccccatatcgcggggggagtgcacctccctgtggtatggttcgaaatatccagggtaagagagggtgctattattccccattttgcaggaggcgtacacccctctatggtatgttttgtaatatcccaggtaaggggtgctattgagagaagagagcaaaagaccccccccatattgttctgtattattttatactcagtacctgttttaagaagaaacaaggaagcgaaaccaaaggcaggcagcccggcgccaggcaccagatccaaaaccagacccgaaaccaggcctgggccttcctgaccttagcctgaaagttaaaattcaacccatgacctagcaactgatgttatccatagattccagacattgtatggaaggacattgtgaaatttcttgttctgttctgtttcactctgagtactggtgcatgcagcccttgtcacatacccactagattgctcaatcaatcatggccctttcatgtaaaaaccttagtgttgtgagcccttaaaaaggacagaaattgtgcactcaacaagcttggattttgatactctagtctgctgatgcttccagctgattaaaagccacttccttcactacctcggtgtctgtgggattttgtccgcggctcctcctgctacactgtgactccccttatagagaggggtgtacacccccctttggttcctaatatccagcgggggagtaggtgctattactccccatattgcggggagtgtacacccccttgtagtacggatcgtaaaatcaaggagggagagaaggtgtaattatccccatatcacagggagtgtacacccctttgtggtatagtttgtaatatccacgacgggagagaatgctattactccccatatcgtggagggtgtacaccgccctgtagtatggttcgtaatatccggaaggggagaggttgctattactccccatatggtgggaagtgtacacccccatgtgatatggttcataatatccaggggggtagaggatgatattacccacaatatcatagaaggtgcacacccttttgtgatattgtccataaaatccagaaggggagaggatgatattacttccaatatcacagggggtgtgtagccccatatgatattgtttgtaatatcaaggtagggagaggatgctattccttacaatagctcaaggggtgtaaccttcttgtgatattgtttgtaatatccagaaggggagaagataatttttttattttaaaagtaaactttaatgtcaaaaatgcaaacttgagaagggcagaaagatcaaacagaaggctgccacttcacaattggagggttgcacagtggccgggcagaggcgctcctcactccccagacggtgaggcagccgggcagaggtgctcctcacttccgagatgttgcaggagccgggcagaggtgctcctcacttcccagaacagggggctgccgggcagaggtgctcctcactgcccagacggtttgcaggcctggcagaggcactcctcacttcccaaacggagcagcggcaagccagaggcgctccacacttcccagatggtggggcagccgggcagaggcgatcctcacttctcagagggtagggcggcccagcagaggcgctcctcacttcccacatggtggggcggcaggctagaggcgatcctcacttcccagacggtggtgtggccatgcagaggtgctcctcacttcccagatggtgtggccgccgagctgaggcactcctcacttccctgacagtggggcggctgggcagaggcgctcctcacttcccagacacttggactccgggcagagactctcctcatttcccagatggtggggctgccgggcagaggcgctcctcacttcccagacggttcagaggccgggcagaggcgctctggggagaggataatgttactcccaatatcgcagggggtgcacactccctgtgatattgttccgaatatccagagggggaaaggatgatatagctcccaaaatcgtggggagtgtacacccccctgtgatcttgtttgtaataccaagaagaaaagagaatgctattatttccaatatagcagggggagtacaaccccctgtgatattgttcgtaatatctagggggagagaaaattatattagtcttaatatctcaggggacgttcatccccctgtaatattgttggtaatattcagaatggagaagatgatattgttcttaaaatacaggaaaaaatatgataatattacttccaatatcgaagggggtgtacactctcctgtgatattgttcccaatatccagaatgaaagaggatgctattactcccaatatcccagggagtgtacacccctttgccatattgttcataatatccaggggaagacaggataacattactcccaatatcaccgggggtgtccacccactagtgatatttattgttcatcatatccagaaaaggagaggatgatattactcccaatattgcaggtggtgtacggtccctgtgatattctttgaaatatctagaaaaggagaggatgatatcactccgagtatcacagggggtgtacacccccctgtgatattgttcgtaatatccaggggagaaaaggatgatataattgccaatatttcaggggatgtgcacctccctgtgatattgtttgtaatatccaggggtggagaggatgatattactcaaaataacgtaaacatcctgtgtgtacatcccctgtgatattgtttataatatccaggggggtagaagatgacattacccccaatatcacagagtgtacacacccctgggatactgttcataatatccaggcgggaaagaatgaactacttccaatatcgcaggatatgtacacccccctgtgatatatttcctaatatttatgtgggtaaggatattacccccaatatcacagaaggtgtacatcctctttgtgatattattcctaacatccaggaaaggagagaatgatattactcccagtatcgcagggggtgtacaccacccctgtgatattgttgctaatatccagggggagaggataatattactcccaaaatcacaggggacgtacactcctcctgagatattgttcctaatattcatggggaaaagaatgctactactccaaatacagcagagggtgtacaccatccccgtgatattgttttttatatccaaagggtgaaaggctgatattactcccaatatcgcagggggtgtacaggccccccatgatatcattcttaatatccagggaggcaaagaatgatgttactcccaatattgcaggctgtatacaccccccgtgatattgttcctaatatccagagtaagagaggatgacattgctcccaatattgcaggggttgcacgcacgccctgtgataatattactcccaatatcaacagtgggtgtacactcctcctgtgatattgtttgttatatctaagaaagaagaggatgatattactgtcaatatcacagaaggtgtacagccccttgtgatgttgtttctaatatccagcggtgagaggatggtattactcgcaatattgtagggggtgtccaacggccctgtgatattgtttctcatattcaaaaaggaaaagaataatataactccaaatatcgcagggtgtgtacacttccctgtgatattgatcctaatatccaggaagagagaggatgatattaatcccaatatcacagggggtgtacatcgcttctgtgatattcttcctaatatccagggggggaggggatgctattactcttaaaatcgcagggaacttacactcccactatgatatttttcctaatatccaggaagggagaaaatgatattactcctaatatcacatatcacaatgggtgtacatctccccgtgatattgtttctaatatcaaggatgggagaaaattatattactctcaatatcgcagggggtgtgcacacctcctgtgatattgttcctagtatccagcggaggagatgatattactttaaatattgtagaaggtgtacaacccccctttgatattgttcctaatatccagggggaaaggagatgatattactcctaatatcgcaggggctgtacaaccctatgtgatattgtttcttctaatatccaggggtggagaagataatattactcctaaaatcgaaggggacatacactccccctgtgatatttttcctaatatccagaaggaaagaggatgatattactcctaatattacaagaaatgtatacctgtcctgtgatattgttcctaatatccagaggggtaaatgattatattactcccaatatcgcaggggtgtacaccttccctgagatattgtttctaatatgcagtggaggagaggatggtattactcccaacatcacaggagatgtaaactccccttgtgatattcttcctaatgttcaggacgaaggagggtaatattactcactgtattgcagcagggggtgtagagccccctgtgatattgtttttaatattcaaggttggagaaaataatattccttccaatatcgcatggggtgtacacccttctttttatatagtttctaatatctggggggagaggatgatattactcccaatatcgcagggggattacacccccactgtgatattgtttttaatatccagggtgggagaggataatattactccaaatatcccagggctatacaccctccgtgtgatattgtttctaatatccagaggaagagaagatgatattactcccaatgtcacagggtgtgtacaggccttctttgatattgttcttaatatccatgagggagaggatgatattactcccaatatcgcaaagactgtacaccctttctgtgatattgcttccaatatccagggagggagaggatattacactcaggatcacagggggtgtacaccccaacctgtgatattgtttctaatatctagggaaaatgagggtgatattactatcaatatcacaggaggtgtacactcccttatgatattgttcctaatatccaggagaatgacaggataatattactcccaatatcgcgggtggtgtctccccccactccgtgatattgttcctaatacccagagggggagagaatcatattactcccaatatcgcaggggatgtacacctacatccggcggagtagaagataatattactcacaatatcgcaagaagtgttcaccttccctgttatattgttgctaatatccagggagtgagaagatgatattactttcaatactgagcgtgtacactacccctgtgatattgtttctcatatccagtagaggagaaaatcatgttactcccaatattgcaggggtgaacacctcctttgtgatatttttcctaatatcaggaaagggagagtatgatattacccttaatattgacaggggtgtacacccccctttgatattgttccaatatccaggggggcagaggataatattattcccaatatcgcagagggtgtacaccccccgtgatattgttcctaatatccagagaaataaaaaatagtattatttccaatatcacagggcgtacattttccctgtaattttgttcctaatatctggggggtggggtggcaggataatattactctcaatattggagagggtgtacacccccctgtgatattgttcctaatattcagggtgggagagaatgatgttactcccaatatctcaggagtcgtatacacccccttgtgatattttttctaatatccaggaggcagaggatgatattgctcccaatatcgcagggggtatacacccgagctgtgatattgtttctaatatgcaatatgggggaaggatgattttactttcaatatcgcagggaatgtacactttccttgtgattttgttcctaatatccaggggtggagaagatgctattactatattactcctcatatcgcaggcggtgtacaactccctgtgatatggttcagaatatccagagtgaaaaaggagggtgacattactcccaatatcgggggggtgtacacccctttgtgatgtggttggtaatatccaggggggcagatgagggtgatatcactccccatatcgtggaaggcgtccacttttttgtgatgtggttctttatatcccgaggggagaaggtgatattactccccatatcgcgaagggcatacacccccctgtgatatagctcataatattccggagagtggaggaagatactatgccctatatcgcgggtggcctacaaccccctatggtttggcttataatatccaggggggagagggtaatattgctccccatattgtggagacgtacagccccctgtgatatggtttgtaatatctttggggggcgagggtgatattactccccatatcgcggggagcatacacccccgtgatctggttcatagtatctcaaaggaagaagttgatgtgtacaacttaagggaaaaagttgaagtgaagtgtacacacgccctgtgacgtggttcataatatccaggcgggggagaggagagtgatatttactccccatatcgcgggtgttgtaaactcccctgtgatatagttcataatatccaggggagagaggagggtgatattgctcctcatatcgcgaagggtgtacaaccccctgtgatatggttcataatatccagaagggtagaggacgatgatattactccacatatcttgggaggtgtgatatggttcgtaatatccagcgatgagagaatgatattactccccatatcgcaaaaggtgtgatagggtttgtaatatcctgagggggagagggtgatattaatccctatattgcagaaggactacaccctcccatgacatggtttgtaatatcccagggggtagagtgtgatattactttccatatcacagggggtgtgatatgattcgtaatattcgaagggggagagggtgacactactctccatatcacggggtgtgtgatatggttcttaatatcccaggggttagaggttgatattaccccctttttggggggtgtgtacaccccctgtgatatggttcgtaatatcccgggggagacagggtgacattattccccatatcgaggggatcgtacaccccctgtggtgtggttcataatatccctagggggagatggtgatattactccccatatcagggggcgtgcactcttctgtggtataattagtaatatccagggggcagaggtcgatattcgtttccatatcatgaagggagtacacttccctgtgatatggttcctaatatccaggggggagagggtgatattattccccatattgcggggggacatacaacccctgtgatatggttcataataaccagaaaagaagagggtgatattaatccccgtattgcagagggcatacaccccccctgtgatatggtttgtaatatctaggggaggaaaaggtgatattactttccatattgctgggtgcagacacccctttatgatatggttcataatatccaagttggagagggtgatattacttcccatatcatgggaggtatacccttccctgtgatatggttcgtaatatccagaaggggagagattgatattactccccatattgtggggggcgtacaccttcctgtgatacggtttgtaatatctaggggatatagtgggtgatattactcaccatatcacgggggttgtaacatggtttgtaatatccaggggaggagagggtaatgttactccccatatctcggggcatgtacaccctcctgtgacatggttcgtaatatccaggtcgggagagggtgatattactcctcatattgccgggggtgtgttatggttcataatatcctggggaaggaggctgctatcactctccacatcttgggggatgtacactctcctgtgatatggttcataatatccagggtgggtgagggtaatattactccccatatcgcgggaagtgtacatacccctgtaatattgtttgtaatagaagagagggtgatattactccccacatcgcgggtggtgcccacccccctgtgatatggtttggaatatccagggggatgaggagggtgatattactccccatatctcggtgggagtacatccctctttgatcaagttcataatatccaaaaggaaacaggagagtgatattactccccatatcgccgggggtgtacacgggagggggagtacacccccggcgatatggtctgtaatatccagggaaggagaggagggtgatattactcaccatatcgcaggtggtctacatttacctgtgaaacagtttgtaatatccagggggggaaatgagaatgattttttttttttgagtctcactgtgtcacccaggttggagtgcagtggcacgatcttggctcactgcaacccccgcctcctggactcaagcaattctcctctcccagcctcctgaatagctgggactacaggcgcaccccacaacgtctggctaatttttgtatttttattagagacggggtttcaccatattggccaggctgatctcgaactcctgaccctgtgatccatccgcctcggcctccaaaagtgctgagattacagatgtgagccaccacgcatggcccaaggagaacgatattactccccatatcccagggggtgtatatccccctgtgatatggttcagaatatccggaaggaaagacagggatattacttcccatatcgcaaggggtgtgacatggttcgtaatatcccatgggggagagggtaatattactcttcgtattgtgaagggcatacactcccctgtgatacagttcataatattccggggagtagaggaagatattatgctccatatcgcgggtggcataagccccctgtggtttggttcataatatccagggaggagagggtaatattactccccatattgtggggacgtacaccctcctgtgatatggtttgtaatatcccagaggggagagagtgatattactccccatattgcagggacatacacccccctgtgatatggttcaaaatgtcttttttttttgaaggactggttctttatttcaaaaagacacttgtcaatattcattatcaaaacagttgcactattgatttctctttctcccaatcggccccaagtagaccacatcaaaggagagtacatattaagccaataagctgtaggatgtacacctaacagacctcctagaaaccttaccagaaaatggggacagggtagggaaagaaactttaaaagatcaacaaactgccagcccacggactgcaggggctgtcacagccagatggggtggccagggtgccacaaacccaaagaagcaaagtttcaaaataatataaaatttaaaaagttttgtacataagctattcaagatttctccagcactgactgatacaaagcacaatgagatggcacttgtagagacagcagcttcaaactcagaaaagggtaatgagatgagtttcacatggctaaatcagtggcaaaaacacaatcttctttctttctttctttctttcaaggaggcaagaaaagcaattaagtgctcacctcaacataaggggaacatgatccattctgtaagcagttgggagggggtagagatggaacaaaattttggtctcagaggtcttgccatcttaatttggtcacttctaatgaaaaaaataaaaaatagaaataacattatccaaaggtatcttaaagctgaaaacttgaacagcacattttttgttgttgttgtttggctaactcctcctggaaccacctttctggcttagctagtactttgtacagagcaatgaggcttcccatagtggagtctccctgggctctgtttggctctcagcaaggcaggcctataccttttcctctcctccatggagagaggaatatgcattaaggtgaaaaatcaccttccaaaagtgagaaagggattcgatcgctgcttcagggctgtggtattatatggaatgttttacaaaaggttgctacaaaacaacaaaagaggtaattacaaaatgtgtacatcacaacatactttttaaagacattatgcattgtgctcacattcccttaaatgttgtttccaaaggtgctcagcctctagcccagctggaatctccgggaagaggcggacagtttggtgaaaaagacacagggaaggagcgggcggcggaaggagggggcggcgaaaggagaaagcagccttccagttaaagatcagccctcaattaaaggtcagcttcgggcaggctggcctcaggcggagtctggttcagagggaggagcagcagcagggtgagactgaggcgttctacatctcattcaggtcaagcagagtctggtccagcatcctttgtgtacagaggtgctcccctttggtgcatttcagtttatcttccaagtcatcaattgtcttttccagcttggctaccgatctctcagcaaactcagcatgggtctccgcctcctttattttatcagtaagaatcttgatctcttcctcatatttgtcttctttttgagagtacttttcttcagcagcactcagacacttcaggttctggtccatcagtctaatctgctcatccatctctcggcaaagggattctgccagctcagctcgttcctctgtgcgttccaagtctccttcaatgatcaccaacttacgagccacctcttcatacttcctatctgcctcttctgcaatgtgcttagcttctctgagttggatttcctggagttccatcttttcttcatcttttaaggcccggttttcaataaccttcttacctctctcactctcatcagcagctttttccgcttcttccagcttttgcagggcagtagccaggtgctcctgagcacggtccagctcctcttcaaccagctggatcccacgttcaaggaggccacctcagcctcagcctgttcccgggcccacctttctccctcaacttctcgctggaggcgctcagctcgctcctctgcatcatctgcctgctgctgcagaacctggatcttgcgcttcaccgcctcgatggtggtgatcccagccatggtgcccacccagctactgctagagctccggttcctgcctcctccgatcggcgttgcagcctcctctcacccttacttccgcctcggttcaaaatatcttaagggaaggagttgatattactccccacatcacgggaagtttacatcccctggtgatatggtttgtaatatcccagggtggatagggtgatattactctccatatcgcgaaggagtactcccccctgtgatatggttcataatatccttggggggagagtgtgatattactccccatatcgcgagggccatatactcctttgtgacatggttcgaaatatcccggtgggggagggggtagagggtaatattactccccatacagcgaagagcatacgcccttctgtggcaaggttagtaatacttcagggaaaagagtgcaatattacttttcatattgcagggaacatacactcccctgtgacatggttcgtaatatcccgggggctgagagggtgatatttctccccatatcaccgggggcctacacctgggtgtgatatggctcataatatacagggagggagagggtgatattactccacataccgagtgaggggttacacaccctcgtgacatgttcgaaataccccaaggaggagacaatgatattactttccctgtcgcgggggctacaccctcccagtgatatggttcacaatatcccggggtggagagggtgatattactccctatatcaccggggggtgtacacttccctgggaaatggtttacagtatccccggggggagagggtactattactccccatatcacgttacatatcagggtacacccccacgtgatatggtttgtaacatcccaggaggaagaaaatgatattactccccatatcgcggtggcatacacccctccccgttaaatggttcataatatcttggggtggagagggtgatattactccccatatcacgtggggcatacaccccactatgatatggttcataatatcccggaggggagagggagatattactctccatgtcgcggggggcatatacacccctgtgatatggtttgtgatatcccgggggcggagagggagatattactctccatatcgtggggtcgtacacttttctgtgatatgattcgtaatatccagacggggagagggtgatattacttcccatattgcgggggcgtacacccctctgtgatatggttcataatatcccgaagaaaagagggtgatattactcctcatatcgcggggaacacacaccaccctgtgatatggtttgtaatattcagcgggggagagagtaatattactccctgtatctcggatggcgtacactcccctgtgatatggttcataatatccagaagaaaagagggtgatattactccccatattccagggaatgtacaccaccctttgaatatggttcgtaatatccaggaggggagagggtaatattgctcccaatatcgaaggaggtgttatacggttagtaatatccagagaaggagagggtgacattactccccacatcgtggtgggtgtgcacccacctgtgatatggttcataatattcaggttaagagaggtgatattgctttccatatcgccaagggtgtacactcccgtgaaatacagttcgtaatatccaaaaggggagagggtgatattactcccatatcgtggggggtgtacacccctctgtgatatggttcataatatccagggtggaataaggtggtattactccctgtatctcggggcatgtacatcgcctgtgatatgattcataatatccagaagaagagagggtgatattaatctccatattgctgggggtgtacaaccccctgttgtatggtttgttacactgagttggggagagggttacattactctcaatatcgagtggggcatacacacttatgtgatatggttcataatatcccagggaggagagggtgatattactccccatatcgcgggaggcatacaccccaatgtgatatggtttgtaatatctacatttttttttttgagacgaagtctcgctcttgtcccccaggctggagtatgatggccggatctcggctcactgcaacctcagcctcccgggttcaagcgattctcctgccttggtcccccaagaagttgggattacaggcgcacaccaccacgcccggctactttttgtatttttagtagagaaggggtttcaccatgttggccaggctggtctagaactcctgacctcagatgatccacctgcctcggcctcccaaagtgctgggattacaggcgtgagccactgcacctggcctggtttgtaatatctatgaagggggaaggtgatattactttccatatcacgggaggcgtacaccacgatgtgatatggtttgtaatatccagggggtatactgggtgatattactccccatatcgcggggagtgtatacccttttgtgatatggttcctaatattaagctgaggagaaggtaatattactccccatatcgcaggggtttttatatggttcataatattcaggaagagagagggtgacattactctccatatcacggggtgtgtactcccccatgtgatatggtttgtaatatccagggaaggagaggttaatattactccccatatcgcagggggtgtacacctctctgtggtttgtaatatccaaagggaagaggatgatattatcttcaatatcttggggggatacagtccccagtgatattgttcataatatccagagggggaggggatgatattactcccaatattgcaggtggtgtacaaccccctgtgatattctttataatatagagggggatgatgatattactcccaatatagtaaacaacctgtgtgtacaccccctgtgatattgtttataatatccaagggtggaaaggatgatattactcctcatatcgcagggggtgtatacccctctgtgacattgttcctaatattcaggggaggagaagatgatactactcctcatatcacaggggatgtacacccccctgtgatacttttggtaatatccaggggaggagaaaattatattattccccatgtcacagagggtgtacaccccgctgtgatagtgttcataatatccaggtgaaaagaggatgatattactccgaatatctcaggaagtgtacacccttctgtgatattgttcataatatccaaaggtggagaggaggatactactccccatatcgcagtgggtgtacacccccctgtgatatggttcataatatccaatgtaggagaggatgatattactttccatatcgcggagagtgtacatccccctgttatattgtttgtaatattcagggagaaagaggatactactactccccatatcacacggggtgtatattcccctgtgatatggttcctgatatccaagagatattataatcctctcttggattatgctacctctcatatcgcatggggtgtacacacactttgtgatatcgtttgtcatatccaaggagggagaggattatattaatcccaagatcacggggggtgtacaccctcctgtgatattgtttgtaatattaaggggggagaggataatattactcccaatataattaacaccctgtgtgtactcctccttgtaatattgttcataatatccaatgggggagacgatgatattactttcaatatcgcagaggatgtacatccctttgtaacaatgtttgtaatataaaaggcaagagaggatgatactacttccaaaattgcaggacatgtacaccccccggtgatattgttcctaatatccagtggggaagaggatgatagtagtcccaatatcgcaaagggtgtacacaccccctgggatattgttcctaatataaaaggaggagaggatgctattattcccaatatcacagaaggtgtaaaatcccctgtgatattgttcgtaatattcaggaggggagaggattatattactcccaatatcacagggtgtgtacacagggaggggcaagggccagaagcgggcgggaatccccatgtttgggcggacccagtttctaatggccagcatttgccaatcaaagcttaccagagaactctaaaagccagggctttcctgctagacaagactcatttctggaactgctttaaaaagaaacaaaacttcccaaggaccccttttcctctctgtctgcctaaaataatgttttaaaaactcctaaagcagctgaattcagcccccttcctgggggaatgtatagacggaactcccacctttcccggcatcccaaggccagagtatgtgaaactcctgggtctctatgtgtgtctgagcggctgctctgccaacactccacacagccctgtgtcctggacccaaggcccttatgacctgagctcaagaggggatctcctgatccatgggttgcaaagatccatgggagaagcatggtttctggggcggggtcacacgctcagtcactgtttccctcggatgccggagatggttcctttggctctctgccaatacagggtgaatcatcatccatccctcttttctttgttctcccgggtcaagttgtttgcctagtcagtcccaatgtgagaacctgaatatttcagttgacgcgctgacttcaaaatccccgggcttcgggaggcggagcttgcagtgagccgagatcccgccactgcactccagcctgggcgacagagcgagactccgtctcaaaaaaaaaaaaaaaaaaaaaaaaaaaaaagtccccgggcttttcttttcactcagtggaaggcagctgcttctaattggccatcttggcccgcccccaccacgtgaccttctgtaaaatgcctccactctccaggaacgctctcattatataactttgcctgaaaccaacagcacgctcattgcacatatcatgggctcatttatttcacttataaagaacctggccaaggaagagatagtgcctaaagtggccagtattctgaccgatatgttagaaaaatggtgtgccgaccaattcatgacatgtgtcccaaaactagcaacggaaattgtattcgccgtgttgaggtctctaatccagatgatgctcatctatgtactggaaaaggcagagtcctttcctgacaagctgctgaaactcttcagaaacatctcatatttcctgaagaagatgatgtctggacaagcagcacaggtcgttcagatttaactttctattcatatatccagcacgatattcgcacaattgtcacgaaaccttaccagttgatgagtcctgcacatttcctttaatttcaggaggaagagggtaatccggatgagttttctgacctactctgctgctgtgattaaacaaccaccaggaaattttgacgacactgttctcctgagctcctccctttcctccgggaacaaaacaattgaatttacaaaaataaagtgttatttgactggagtgaggtctcatgtctgcttatgcggtggctcgctgctcagaacagggtgagtctctgggttgtgtgctgaggaggggaggctctcaatctggagaaaacccactgcaggggacacctccatggggtctgagggactgaggatgaggagccggactgggtctagggaaggaggaggtttcagagggtgaaattctggcactaaagcctgggggtgtttgggaacttcctccttccgaagaagtttcagggagggataaagacaaaccctgggctccttgaggggcccttactaatttgagaggactctatcgggaaggagagtgacaatggcctccttgaggactgaggcccctgaataaatgaggcccagatacagtccatgggggatgagaccttcaagggtcacattttggttgggacagaggaaaagtgcagctctgcagccgcagaggaaaacccggcagtgtgaaagcgaccttggaggggccctgtgcgctctgaatgcgtctgagcccccatcccctgtccccgcctctctttctggattcttccagctcggctgtctccgccatcttctgagcgctccaccctgacttattcaagtttcccttctgccttccaagtactccaaaatctttcagatctgtgtccctacccctgtttttagcatgtgttggggctccaggtccctgaaggtttctggcctgaaatccacctccccagcggagtggactgcgttctagagactccacactccgcgaggttcccaggcccctgagggacaaccgagtggcctgcgcacttcagggctccacactcggcaaggtctttcaagcccttggggtccccttcttagttttttccacctttctgggctgcagtcactccataaatgctgggatctgatccccacccccactctcgtttcctcaattctgcgggctacacgctctggcaaggtcctccgggccctggatcccctccctctccctatgcccacgctcctagtcagcccttctggggtccactattttcaggaactaaccgttctcatggagccttgctaaccggaaagctgtgtggaagaaaggctttgaggatagaggtggagatttggctcttccatagtgccactcacccaccccaccatgctgccactgccagacccggacccctgtttcagaacaagtgaccagattcgctcctggacagccctggacactggccttttctctgaaaactactcaccctttctctagtccccacttcatgccagcctcataccctcttccttcccccacgctggcttccgggatcctcctctgctcagacaacctcttctgtgtcccacccccgtttttagaatgctttggggcaccaggttgggggaaggtttctggcctgatatccatctctttccaaactcccttcttcccttgaaaggcttcttgccttcagccccacttctggctccgaggtttcaggacaccctcctcttcatcctcattcttttgaccaccagctttttaggaattcgaacgtccctctcatcttcgtgaatcctgtccaggcatttgttgaccccttcatctgatacccctgacctcacattgccaaaagtctacccctacccagtacactggaattagacaaaatcccaggagttttacctcaactctgagtgtgcccacaggagctctccctgaagccacgtccttttaagcagggtctagggttcctcccttgtcttaatgaactctttgtcacacggaggacgttatggagcccttatgatctttcactgcctttctgcccagcgttttgtctttccatggacatttataatattttccatggacattttgttctctcaatgtccacccctaatttccaacatcccaaagattctcatgtgtttcctgaaagccatttacaggaatggctgtgcccagacccccttccccaggatcctccttcacacctggtaggtgcctctcctagagagatttgcactcagttgtcgtgcagtcacatggcccagatggttgttaatcacccccttcctggcaacagctagcagccagggaatcactggcacagaaacctcagggtgaccaagatgaggccacctctgtgctgaaggctgtgctccagagcctgcttgggatcaggcttaagcaggtcttcagccagacctgatgttacctggtttccttgagctgccctgcctgagctatcgggagcactccctcaatgcacatcttgattccctatctcatgctctgcttctagaaaccatgagctatcaattgctactggcaatggtcctgggaagtcaaccctaagtatggattctggggttggatgactccccacaggacttcagtgagcaacaatcactgctggcagttggaggacagagtcgctagggcatgtgaccactgtgaaaccaccgatgtttcacctggggtaattttggatgaactacggtagaagcactgaaggtacattgcttttggtttggaagattgtaggtaaataatagcgatatgaatgtggaattggatggctgcaaacgagtgccattgatgcattgaaagaggaaaagtcaggctgtcacctgtcactcagcaatttaaagtgtgagagttgggactagatgtggtggctcacatctataatccagagattcgggggaagcttgaagaggtaggatcttttgagtccaggagttccagaccagcctggacaccagagcaagacctcatctctacaacaaaattttcttaaaaattagatgggcttggtggcacgcacctgtacttgtagatctagctaatggggagcatgagataaaaaaatcacctgagtcagggacttaggggttacaatgaggtatgattgtgccagtgcacacactcccacctggccaacagagtgagattctgcttccaaaaaaataagaaataaatcaggtttgagagttggaaagcatcatcttctcctagagccaaaggacatgtacaactgagacccaggaacaaagcttcatcacaaagagaccatcatcagtggagccgggagatgcattccccctcaccctgccttgaggaggcagtggagtcatctgtctgggatcctttctgacccagccctatttgtttgtctctttggcttctttggatttgtatattttagctgttataacactgtaaaacaaacagagtgatttttttgagttgtgtgaatgatgctagctccatagtcaccctgagagtgatgggaacttttgaatttgtggcaagttggagggtagtgtaagtgacctgagattgccaaattggggctagcactggatgtgaggttaggctagtggaaaaatatgcccagaaccagaggagtgtgggctcactgcaggtggttaggctcagatccaaattgtacagatggatagctttggggtaaagaataacatagttgagaagtgcatgtgttagtctgttcatgcactgctataaagaattacctgagactgggtaattatttataaaactcaggtttaattgggtcatggttccacaggctgtacaaaaagtatgatgctggccatcagctcaacttctggggaggccccagaatagttagagtcatggcaaaaagtacaagggaagcaggctcatcttccacggccagagctggagcaagtggtaggagaggtgatacacactttcaaacaagtaggtcttttgagaactccatcaccggacagcacctatgggatggtgctaaattattcatgaaatatccgcctccataatccactcaactgtcaccagcgcagccagccccacctccaacagtggggattacaattccatatgaggtgtgggtggggacacagctccaacctcaatcagtgggcatcctggattgggtctactatagaaggagaaccaggagctgactatgatcttgaaccctacccatgatggccgggcggggtgactcatgcctgtaaccccagcactttgggaggctgaggtgggtggatcgcctgaagtcaggagttagagaccagcctggccaacatggtgaaaacctgtctctactaaaaatacaaaaaattagaccggcgttgtgctggatgcctgtaatcacaccactacgctccagcatgggaaaaaataccaaaacttcgtctcaaaaaaaaaaaaaaaaaaaaaaaaaaaaagactgcccatgaccactgcaccagtgagagggacaccagcatcactgagatgcaagggctggacattcttcataggtcagagctcaaagcaggggacactgatacagagatgggctccatccatagcaccaaagtggtgagaggatgtgggaatggcagaggccagcactttgccatcaatgcaagggggtataaggaggtgacaccagtgccagagtacatcacggggggactgccctacaatatctaggacttacctcttagagcgtgtttcattagcgacaacagatataaatggcagacaggtgtgtccctgcattaacaggaaatagaaatcatcaagaggaacagaaggcagatgtcagcagccccttagaaagtcatcatccttcatacagttaaaatctgagacagttctcacacgagaaggcctaactcaaaaagaggctgggttctcatgaggcaggtttatgcaaaaccaaggaaggtgtacaagtttggaattctccagtttcccttggaaaagacctacagtcatttgcttaggtaactgagcactgaacaaaggtgagtattgttgtcttttagaagctcttggccaagaaggccttgttggcataaaacccatggtttggaaacatcaccatgacccctgttagagtaatggcctaagggtgggggtcaggaaattgatgtattccttgccaacttctgcctctaagtgagtgaactctgtttgtgaacctctctcctctgtggttatgttcctaggctctcatgtataatcaggagtcatagacttagaaacaggaaaaatacttacagtgtttttgtggcctgtgagctatgacttataattttaggaaaaaaacaattgcaaatggaaagcctaagtctatcaatgctcatccaagacaacataatcaataaaaaccaatatcaaatctcaaggcaaattatttcctgtatatagatggcagagatgagcaccaccatcaaaaactcaaggaccagtgctgtgggtccagtcatctgtttcatggaattcaccagtctggtatcttcaaaatccagaaggatgatggcagatggcaggaaagtaatgcaaacgtcatcaggtgtgaccccactgtagcagctgtgatggatgttttctctcaccatagcaataaataacacaacctcggtcacactgtatgcattgttggtctgcaaaatccatgttttgcaaaactcttcaggaaggtggatctgtaatattggcattgacatgagaacaacagcagtatttattcacaatctcaagctctctgtcttcccgtctctctcattagccatccaagtagtcctgaggaaccaagcccatcagaacattctgcaacataatacacagctccattctccattcaaattttgttgttgttgttgttgttgatgagacaacatcttactccatcagccaggctgacgtacagtggggctatctgggctgactgtagtcttgagcttccaggctcaaggcatcctctcacctcagcctcctaagtggcttgaactacagacacacagcgacatgctgggctagtttttgtatattttgtagagacgtgctctcaccatgttattcaggctggactcaaactcctgagcgtaagtgatccaagcaccttggcctcaaagtgctgagattacaagcctgagccactgcacccagcccaatctccattctactgataacaatgtcattaccaggtctgatggacaggaaatggtaaggtttctgaaaacctaaggatcacacagcgagttccaaaggctgaaagtgcatacctgtcgacactgataccaatgacatccaatggtgagaatgacattccttgtagtcctagctctgctcataacaaatctatactgaagtgtaagagtttgatggtcatggggattttccatgtctctgcctttcagcgatgtgccatatctgtgaagtgttcagaaatgcaacagcctgaggcatgctgggcatatcctctaataaaaaggaaaatgccattttatggtcctgtatttctacaagttggaacacatgggcctgtgatccagatgggggaaatgggaatattcccactcattcaccttcatccacgaagcccatttgaaagctttgggcttcccatccttgtagattttagtgttgtgggctgggtgcagtggctttcacctgtactgccaacactttgggaggcctagacaggtgaatccactgaggccaaaagttcgagaccagcctggccaagatggtgaaaccccgtccctactaaaaatacaaaaattagcaaggtattggggccagcacctgtaatcccagctgctcgggaggctgaggctggagaatcgcttgaacccaaaaggcagagactgcagtgacccgatcctgcctttgcactccacctgggcaagcagaacaaaacttctgtcttgaaaaaaaaaacaaaaaacgaacaaaaaagatgttagagttctgggtttagaggtctataccccagaaagagaatggtttcaacaagggacaaagaagttgctttaaacgttgacttgccatttcttttcagtgtgtttgttctcttgcgtcaagagaccaccagaaaagtggtgcaattactctcctgtcaagaatcattgactatcatctgcaagagggtcagatcctggtatataattagggcagaaatacttagtctgagaagggtatgacatccagaggccctattaatgatgtccttttctccatgcctgactctgaccccatgtgctggactgcccctgtgtggatggcctcatggcctgctcggactctgaggtcccaccccaagtggcacctccatggagggctctactcttgtatgggctctgacactcacactgagacactctcccatggacacctcttcacccacttggggtctgaaactgggctactccatccctccctaacctggaacagagagctttcactgctattacacaagtcatagaggctaactcctcatttttccaagctaattattgaaacattagtcctgggttgataagacaagataagttaacttttcataaatttgcttatcaagttttgaataaattcaaataaattcaccttccccacacaccttagttgtcgacatcacacgcgcacccatactcacagggtgagcacgaaggcttcactgtcagtggagaaagtggcaaaacccttctgtgcctcatcctggtctagacctggccctcatcctttcccactcttcccctcactcccttggattcatccacactggcctcctgcctgctgctccacctccctgcgaagctcacccctgcctcagggcctttgcacgtgcagtggcttcaagccatatcctcttcacccagatctcccagatctcctgaatgatcttcttttatcattcaggtctcagcttgcatgtaatcttctcagtgaggattacccaaaccacatagttcattcattcattcaaatattcattcaatggcatattgacaaagcagctacttcatgccaggccttgggccaggtgttatggatatggcaacaaacaaaacaagagttttctgctctcaaatttttacccacttaaaggagatatcatacatcatctgtaaataaatacatcatctgtaaataatgatgtaaataaatacatcatctgtaaatctgtaaataatgatgtaaataaatacatcatctgtaaataaataaagtataataaaagaaaatagtaggtttttttggttggaggtgaccgtgaagtttgcaaataccatcttacaacacattattttattttatttcatttcatttttaattttattattattatactttaagttttagggtacatgtgcacaacgtgcagatttgttacatatgtatacatgtgtgaagttggtgtgctgcacccattaactcgtcatttagcattaggtatatctcctaatgctatccttcccccctcccccaccccacaacagtccccggtgtgtgatgttccccttcctgtgtccatgtgttctcattgttcagttcccccctatgagtgagaacatgcggtatttggttttttgtccttgtgatagtttgctgagaatgatggtttccagcttcatccatgtccctacaaaggacacgaactcatcattttttatggctgcatagtattccatggtgtatatgtgccacattttcttcatccagtctatcattgttggatatttgggttggttccaagtctttgctattgtgaagagtgccgcaataaacatacgtgtgcgtgtgtctttatagcagcatgatttataatcctttgggtatatacccagtaatgggatggctgggtcaaatggtatttctagctctagatcactgaggaatcgccacactgacttccacagtggttgaactagtttacagtcccaccaacagtgtaaaagtgttcctatttctccacatcctctccagcacctgttgtttcctgactttttaatgatcgccattctaactggtgtgagatggtatctcactgtggctttgatttgcatttctctgatggccagtgatgatgagcatttcttcatgtgttttttggctgcataaatgtcttcttttgagaaatgtctgttcatatccttcacccactttttgatggggttgtttgtttttttcttgtaaatttgtttgagttcattgtagattctggatattagccctttgtcagatgagtaggttgtgaaaattttctcccattctgcaggttacctgttcactctgatggtagtttcttttgctgtgcagaagctctttagtttaattagatcccatttgtcaattttggcttttgttgccattgcttttggtgttttagacatgaagtccttgcccgtgcctatgacctgaatggaaatgcctgggttttcttctagggtttttatggtttgaggtctaacatgtaagtctttaatccatcttgaattaatttttgtataaggtgtaaggaagggatccagtttcacctttctacatatggctagcctgttttcccagaaccatttattaaatagggaatcctttccccacttcttgtttttgtcaggtgtgtcaaagatcagatagttgtagatatgtgacattatttctgaggactctgttctgttgcattggtctatatctctgttttggtaccagtaccatgctgttttggttactgtagccttgtagtatagtttgaagtcaggtagcatgatgcctccagctttgctcttttggcttaggattgactttgcaatgcggggtcttttttggttccatgtgaactttaaagtagttttttccaattctgtgaagaaagtcattggtagcttgatggggatggcattgaatctataaattaccttgggcagtatggccattttcacgatattgattcttcctacccatgagcatggaatgttcttccatttgtttgtatcctcttttatttcattgagcagtggttttagttctccttgaagaggtccttcacatcccttgtaagttgggttcctaggtattttattccctttgaagcaattgtgaatgggagttcactcatgatttggctctctgtttgtctgttattggtgtataagaatgcttgtgatttttgtacattgattttgtatcctgagactttgctgaagttgcttatcagcttaaggagattttgggctgagacaatgggttttctagatatacaatcatgtcgtctgcaaacagggacaatttgacttcctcttttcctaattgaataccctttatttccttctcctgcctaattgccctggccagaacttccaacactatgttgaataggagtggtgagagagggcatccctgtcttgtgccagttttcaaagggaatgcttccagtttttgcccattcagtatgatattggctgtgggtttgtcatagatagctcttattattttgagatatgtcccatcaatacctaattattgagagttttcagcatgaagggttgttgaattttgtcaaaggccttttctgcatctattgagataatcatgtggtttttgtctttgggtctgtttatatgctggattacatttattgatttgcatatattgaaccagccttgcatcccagggatgaagcccacttgatcatggtggataagctttttgatgtgctgctggattcggtttgccagtattttactgaggacttttgcatcaatgttcatcaaggatattggtctaaaattctcttttttggttgtgtctctgcctggctttggtatcaggatgatgctggcctcataaaatgagttagggaggattccctctttttctattgattggaatagtttcaggaggaatggtaccagttcctccttgtacctctggtagaattgggctgtgaatccatctggtcctggactgtttttggttggtaagctattgattattgccacaatttcagatcctgttattgctctattcagagattcaacttcttcctggtttagtcttgggaaggtgtatgtgtccaggaatttatccatttcttctagattttctagtttatttgcgtagaggtgtttgtagtattctctgatggtagtttgtatttctgtgggatcagtggtgatatcacctttatcattttttattgcatctatttgattcttctctctttttttctttattagtcttgctaccggtctatcaattttgttgatccttttaaaaaaccagctcctggattcattaattttttgaagggttttttgtgtctctatttccttcagttctgctctgattttagttatttcttgccttctgctagcttttgaatgtgtttgctcttgcttttctagttcttttaattgtgatgttagggtgtcaattttggatctttcctgctttctcttgtgggcatttagtgttataaatttccctctacacactgctttgaatgtgtcccagagattgtggtatgttgtgtcttttttctcgttggtttcaaagaacatctttatttctgccttcattttgttatgtacccagtagtcattcaggagcaggttgttcagtttccatgtagttgagcggttttgagtgagtttcttaatcctgagttctagtttgattgcactgtggtctgagagacagtttgttataatttctgttcttttacatttgctgaggagagctttacttccaagtatgtggtcaattttggaataggtgtggtgtgatgctgaaaaaaatgtatattctgttgatttggggtggagagttctgtagatgtctattaggtccgcttggtgcagagctgagttcaaatcctgggtatccttgttaactttctgtctcattgatctgtctaatgttgacagtggggtgttaaagtctcccattattattgtgtgggagtctaagtctctttgtaggtcactcaggacttgctttatgaatctgggtgctcctgtattgggtgcatatatatttaggatagttagctcttcttgttgaattgatccctttaccattatgtaatggccttttttgtctcttacgatatttgttggtttaaagcctgttttatcagagactaggattgcaacacctgcctttttttgttttccattttcttggtagatcttcctccatccctttattttgagcttatgtgtgtctctgcacgtgagatgggtttcctgaatacagcacactgatgggtcttgactctttatccaatttgccagtctgtgtcttttaattggagcatttagcccatttacatttaaggttaatattgttatgtgtgaatttgatcctgtcgttatgatgttagctggttattttgctcattggttgatgcggtttcttcctagccttgatggtctttacaatttggcatgtttttgcagtggctggtactgactgttcctttccatgtttagcgcttccttcaggagctcttttagggcaggtctggtggtgacaaaatccctcagcatttgcttgtctgtaaaggattttatttctccttcacttatgaagcttagtttggctggatatgaaattctgggttgaaaattcttttctttaagaatgttgaatattggcccccactgtcttctggcttctagagtttctgccaagagatcagccgttagtctgatgggcttccctttgtgggtaacccgacctttctctctggctgcccttaacattttttccttcatttcaactttggtgaatctgacaattatgtgtcttggagttgctcttcttgaggagtatctttgtggcattctctgtatttcctgaatttgaatgttggcctgccttgctaggttgcagaagttctcctgggtaatatcctgaagagtgttttccagcttggttccattctccccatcactttcaggtacactaatcaaacgtagatttaatcttttcacatagttccatatttcttggaggctttgtttgtttctttttactctctttcctctaaacttctcttctcacttcatttcattaatttgatcttcattcacttatatactttcttccacttcatcaaatcggctactgaaggtattgcatgcatcatgtagttctcatgccatggttttcagctctatcaggtcatttaaggtcttctgtacattgttttctctacttagccattcgtctaatcttttttcaaggtttttagcttccttgtgatgggtttgaacatcccctttagctcagagatgtttgttattactgaccttctgaagcctgcttctgtcaacttgtcaaagtcattctccatccagctttgttccattgctggtgaggagctgcgatcctttggaggagaagaggtgctctggtttatagaattttcagcttttctgctctggtttctccccatctttgtggttttatctacctttggtctttgataatggtgacctagagatggggttttggtgtggatgtcctttttgttgatgttgatgctgttcctttctgtttgttagttttccttcgaacagtcaggttcctcagctgcaggtctgttggagtttgccggaggtccactccagaccctgtttgcctgggtatcaccagcggaggctgcagaatagcaaatattgcacaacagcaaatattgctgcctgatccttcctctggaagcttcgtctcaaaggggtgcctggctgtatgaggtgtcagttggcccctactgggaggtgtctcccagttaggctagatgggggttagggacccacttgagaaggcagcctgtccattcacagagctcaaacactatgctaggagagccactgctctcttcagtgctgtcagatggggatgtttaagtctgcagaaatttctgctgccttttattcagctatgccctgcccctacagatggagtctacagaggcaggcaggcctcattgagctgcggtgggctcctcccagttcgagcttccagaccactttgtttacctactgaagcctcagaaatggtgaacacccctcccccacccagtctgccgccttgcagttccatctcagactgctgtgctagcagtgagcgaggctccatgggcgtgggacccactgagccaggcacaggatataatctcctggtgtgccatttgctaagaccattggaaaagcacagtattaaggtgggagtgtcccaattttcccagtacagtctgtcacgggttccctcatctaggaaaggtaaatcccctaaccccttgtgcttcccggtgacgcaatgccccaccctgcttcagctagccctccatgggctgcatccactgtccaaccagcccaatgagatgaacaaggtacctcagttggaaatgcagaaatcacccatcttctgtgtggatcaggctgggagctgcagaccggagttgctcctattcggccatcttggaatggcaatctatgtttgctttttacatttgaaaaaactggtgtcacgtacctaggtattaatcattgtggtatcctcttgccgatttacctctttatcattaactagtgaccctccttgtcttttgttgttacagtctgtgattttagtctattttatctaatatgagaatagctactctggcacttttttggtttccagcttcatgaaatatccttttccatttccctgttttcatttccctttcggtgtctctatagatgaagttgatttctttaaggcaccataagttgggtcttatttctttatccatttgaccatttagagaatttagaacactgtcagtgttattattcataagtaaaaacttaagagtgggtgtagtggtgtacatctgtatttcctgcactttgagagactgaggcgagctgatctcctggggtcaggagtttgagaccggcctggtcaacatgatgaaaccctgtctctactaaaaatacaaaaattagccaagcatgctggcatgtgcctgtaatccaatttacttgggaggctgaggcaggagaagcttgaacctgggagacaaatgttgcagtgagctgagatcacacagagaagtcatctccactctcctcatcagaacctcttgttcacagcatttgtgagcacaaatcaatgatggttattctttcctactaattagggatattttattacacagcaatagcctccagcaaagggaaccatcatacatgattcctacaagttgacagggctggaattatcactgaaaaactaaggtggctatacttgattcccaatgtccaatttttcatgaatagagaaatttatcctttttccccccagccagaaaccaagttttgctcttacgcccaggctggaatcaagtggcacaatctcagctcactgcaacctctgccccccagcttcaagaaattcaccttttgaacaaggagatattaaggatacactatgtgtatgctaccggtggttgcaggagactcagaaaagagagaaacagtcactggcctcgtgcaactgatattctcgggaggagagaaaggcaatcaagaaagaaacatgctgtatttcagacagctgtaagtcctccacaagaaaagaaagcaggtgaggaacataggaaatgtgtcaaccataaggttcccgctaattctataagttggtcagggatatcctccaagaataagcagcatctgagcaatcacctgaagggaggaaggaaggaagactgtgagtggtggcttacacctgtaatcccagcactttgggaggccaaggagggcagattgcctgagctcaggagttcacgaccactcagagcaacctgttgatacccaatctctactaaaaacacacaaaaaaattacccgggtgtggtggcacgcacctgtagtcccagcttccatgcccagctgatttctctctctccatatatatatatatatacacatatattgtttttgcagagatagggtctcactgtgtcacccagtcatcaagcaattctcttatactgttttggaaaagcatgggaattacaggtgtgaaataccctgctggtcctgaaaaatgtgatatttgggattctctgcctggcttgttttacccaaaataatgacctccagttccttccaggttgctgcaaaagacatgattttcactgttttataactgaatagtattcctgtatgtatacataccacattttctttatttattcttctgttgattgacatgtagggtgattccatgtctttgctactgtaaataatgctgcagcaaatatttgtgtgcattttgatctattcctttgagtaggtacccagtactgcaactgcaggactgagtagttgttatattttttgttctttcagaaatctccatagtgtttgccataaaatctgcactaatttacattcccaacaacaatgcataagatttccccttttctccacattctcactaacatttgttatgtttttgtctttttcataatacccattctgactggagtaagatatctcattgtggtggttgttgatatttttgagacggggtctcactctgttgccagactggagtgcagtggtgtgatcgtggcttgctgcaacctccacctcccgggttcaagcaattctcctgcctcagcctcccgagtagctgggactacaggcgcgtgccaacaggcctggctcattttttgtatttttagtaaagacagggtttcaccatgttggccaggatgatcacagtctcttgagctcatcatacacctgcctcagcctcccaaagtgttggaattacagtcatgaggcagcgcacccaacctcaatgtggttttaatgaccatttctctgacgattcatggtgtggagaatttctttgaaataccttttggccatttatatgtgctcttttaaaaactgactcctgtccaggtgcggttgagcatgcctgtaaccccagaacttcgggaggctgaggccaatggatcacttgaggcaaagaggcagaaatcagcctggccaacaaggcaaaaccccatctttactaaaaatacaaaaaatcagccacgggctgtgactcgtgcctgtggtgcaagttactcaggaggttaaggcacaggaattgcttgaacccggtaggcacaggtcacagtgagccaagatcatggcactgcactacagcatgggtaatagagaaagacctgtctcataaaaacaaatgaataaataaataagataaaaaataaaaaagtctctttatgtcctttgccgactttttaatgggattctttggagttttctgttgtagttgagatctttgtttactctcggtattagtcttttgtcaaaggaaaagtttacaaataatttcttccgttctgcagtttgtctgctcactctgttgagaggattatttctttggctgtgcagcagctttttgtttcagtaaagcttttgaatttatataattaaaattttcagtttggtttaaatttgcactggtcgatttttggttttgttgcctgtacttttgaagtcatactcttgaactctttactagacaataaccagaagagttttctctagttttcttctcacatttttattatttcagtacatatatttaagtctataattcatcttcaattgatttttgtagaaatagtgagaaataggagtccaggtttattcttctgcaaatgacaattcaattgttccagcaccaattattgaaaagggtgtgctttcctcaacgtatattcttatcagctttgtcaaagatcagttggctataaatgtgtggctttctttctgggctctctagtctgttacatcaatctgtgtgtctatctgtatactactaccatgctgtattggtgatgatggctttgtaatataatttgaagtcaagaaatgtgatgctcccagctttgtttatttgcttcagaaaggctgagtcaacagctgcagagatgaagctgcccctcctcgcagggctccttcccggaaaaagatcatggctcccactgaccatataaccatggctggaactcctgaaattcccaaagggaggccctacccagtgaggggggatgaatgaaggtcctacttaaggaatctgtctggccacaatcaggcacagcagctgtgctgccttgtgggggaccagaccacctggattccctggagcctgcaggctagaatgtctgagtccatggaaacacagaaatggaggccgccctcacctccccagaaaactgtagtctcaggcagtctccagccgattgccactggttggctgctattccaagccagtgggtcttaacttgagaggtgctgtggaagtggggcccacggaatgaggctgcttggctccctggattcagccccttttctaagggaatgtacagatggaactcccgccttgcccagctttccaagtatataaaactcctgagtctctgtgagtgtctgagcgagtgctctggcaacattcgacacggctctgtgtatctgacccaagacccttatggcatgagctaatgggaggatcttctgatccatgcgtggcaaagatgcatgggagaaacatggtttgtgggtaggggttgtgcattcactactgcttctcttggctgtaggtgaaggtttctttggctctgtgctgatactgggtgcaccatcacccaccccctttgtttcttctcctgggtcaagtcatttgcctaatcagtcccaatgtaggaacctggatacttcagttcaaggtgctgaattcaccgtgcttttcattcaggggaagacagctgcttctcattgggcatcttggcctgcccacttcacgtcactttttgtaaaatccacaccactccaggaatatccattacttaacttcgcctgaaataaacagaaggctcattacacttatcatgggctcacttacttcgcctataatgaaggtgccatggaaatgctagtggatgacgtggtccattttcttagggatgagatagaaaaatggtgtatggctttttaatttaattaaaatttttagtttggtttaaatttacattggtctctttttggttttgttgcctgtacttttgaagtcttactcgtgaactctttactggacaatgaccagaagagttttccctaagtttcttctgatattttgaccatttcagtacatacatttcagtctataattcactttaaattgatttttgtaaacatggtaagaaataggagttcagatttattcttccgcatatgataatgcaactgtcccagtaccaattattgaaaagggtgtgctttccctagtgtatattcttgtcagctttgtcaaagatcagttgcctatgaatgtgtggctttcattttggattctctcgtctgttacatcaatctgtgtgtccacatttatacctgtaccatgctgtattggtgactatggctgtgtaatatattttagagttaggaaatgtgatgctcccagctttgttcatttgcttcagctgaaaaggttgagtccacaattacaaagatggcagccgcccatccccggaggacctccaacccagaaagagatcaggcttcccaccaaccctataaccctggctggagttcctgaaattccaacagggaggaccttcccagtgaggagggatgaatcaaggtcaaatttaaagaaacagtctggccactatcaggcacagcagcagtgctgccttgtgggggacccctcctgctccagaccagctgccctccctggagcccgaaggctagattgtctgagtctacggaaacagagacggtggccgccccaaccacccagaactcggtagtctcaggcacttggcttgctatcttgccactgcttggctggtattccaagcccgtgggacttgagaagtgctgtgatgatggggaccacaggatgaggctgtctggctccctgtgatatggctgtgatgagtggaggaacaccagggctcatgtctcacacagaattggagaaaatgacacaaacacatgtacagtggttttatggcgtgcagtttaataggcaagaacgaaggaagagctccccatactgagacagagggaggggggctccaaagccaaaagaggaaacccggagtgctgtggataccaatgagttatatgaagaaactggagggggcggtgtctgatttgcatagggttcaggcgattggttcgaccaggcatgtcatttatgtggcccacggaaaaactggccctcccacctagcctttgaatatgcacgtgccggacaccctgatttcctacactcatggggatatatgggggtggccatatcgccaggcacaggtggggacaagggccagaagagggcgggaatcgctatgtttgggtggacccagtttctaatggccggcatctgcagatcaaggttaccggagaactctaaaagccggggctttcctgctagacaagactcatttctggagctgctttaaaaagaaacaaaacttcccaaggaccccttttcctccctgtctgcccaaaataatttcttaacaactcgtataacacctgaattcagcccccttactgggggaatgtaccaacggaactcccacctttcctggtttctcaaggctagattgtgtaaacctcctgggtctcggtctgtgtctgagcagctgctctgccaacactccacacagccctgtgtactaggcccaaggccgccgtgactcagcccatgggaggatctcctgatttcttggttgcaaagatccatgggagaaaaatggtttctggggcggggtcacacactcatggcttctcttggctgtgcaagaaggttcctttggctctgttccaatatagcgtggttcatcacccacccctgttttctttgttctcctgagtcaagttgtttgcctagtcagtcccaatgtgagaacctgaatatttcagttcacgtgcttatcgtgaaattcactgagactttaattcagtggaaggcagcctcttctaattggccatcttggcccgccccctccacgtcacctcccataaaatggccacgctctccagggacgatgccattatatatctttacgtgaaaccgacagaacacttattacactttttgtgagctcatttacttcacttataatgaacatggccatggaaatgctagtggagaaagtggtcgattttctgatggatgtgataaaaaaatggtttgccgaccaattaatgacatatgtctcaaaactagtaacgagacccttaatcgctgggttgaagtttctaatcaagaagatgctcatctatgtattcaacaaagcagcttcccttgcttctgaaatgcttccaaacaacatctcatatttcctgaagaagataatgcctggacaagcagcacaagtcattcaggtttactttcagctcataaatccagcaggatattcgcacaattgttgggaaaccttatcagttcatgagtcgtgcatgtttcctttaatttcaggaggaagagggtaatctggaagagtttcctgacctactctgctgctgtgattaaacaaccaccaggaaattttgatgacactgttctcctgagctcctccctttcctcggggaagaaaagcattgaaactacaaaaataaagtgttatttggctggagtgaggtctcatgtctgcttatgcggtggctcgctgctcagaacagggtgagtctctgagttgtacgctgaggaggggaggctgtcaatctagaaaaaacccattgcatgggacacctccatggggtctggggggctgaggatgaggagctggactggatctagggaaggaggaggtttcagagggtgaaattctggcagtaaatcctgggggtgtttgaaaacttcctccctcagaaggagaagactcagggaggaataaggacaaaccatgggtcccttgaggggcatttactaacttaagaggactttatcgggaagcagagtgacaatggcctccttgaggactgaggcccctggataaatgaggcccagatccagatccagtccatgggagatgagaccttcaagggacatatttttgttgggacagaggaaaagtgcagctctgcagctgcagaggaagccttggcagtgtgaaagcgaccttggagggggccctgtgcgttctgaatgcttctgaggtccatcccctgtccccgcctctttttctggattttttgggctccatggtctccgccatcttctgagcgctccacgctgccaccttcagttttctcttctgggctccaaatactccaaaatctttcatatctgtgcccctacccctgtttttagcatgtgttgggactccaggtccctgaaggtttctggcctgaaatccacctccccagcggtgtggattctgctctagagaccccgcacttggcaaggttcccaggcccctgggggacaaccgagtggtatgtgcacttcagggctccacactcggcaaggtctttcaagcccttggggttccctcctcagttttcttcacatgtctgggatgtagtcactctataaatgccgggatgtgatccccaccccagtgattttttttagttccatgagtgttgctatctgaatagtcatcctgagagtgatgggaccttttgaatttgcagcaagttttagattagtgtgagtggcctgagatcgcaaaactggggctagcattggatgtgaggttaggctggtggaaaaatttgcccagaacctgaggagtgtgggctcactgcaggtggttaggatcagcacagaattgcaaggatgtatagctttggggtaaagaataacatggttcagaagtacatgtattagtcttttcatgcattgctataaagaattacctgagactgggtaattaattataaaaactcaggtttaattggctcatggttccacaggctgtacaaaaaggatgatgctggccatcagctcaacttctggggaggcgtcagaaaacttagagtcatggcaaaaagcacaagggaatcaggctcatcctccatggccagagctggagctagtggtaggagaggtgctgcacacttttgaacaatcagatctttttagaactctatcaccagacagcacctagaggatggtgctaaattattcatgaaatatccacccatatgatccactcaattctcaccggcccaaccaggaccacctccaccattggggattacaattacacatgagatgtgggtggggacacagatccaaactcgatcagtgggcatcttggactgggtctactatagaagaagaaccaggagctgactatcatccttaagactgcccatgatggccaggcagggtggctcatgcctgtaatcccagcactttgggaagccaaggtgggtgaatcccctgaggtcaggagtttgagaccagcctcgccaacatggtgaaaccctgcctctactaaaaacacaaaaaattagatgggtgttgtgccagacgcctgtaatcacagctactccagaggctgaggcatgagaattgcttgaacctgggaggcggaggtggcggtgagccccaatcgcactgctacactccagcatgggcaacaataccaaaacatcgtctcaaaaaaaaaaaaaaaaaaaaaaaaggctgcccatgaccactgccccagtgagagggacaccagcatggctaagatcaagtgctggacattcttcatgggtcagacattaaagcaggccacactgttacagagatgggctccattcatagcaacaaagtggtgagaagatgtgggaatggcagaggccagcactttgccatcaatgcaaggtgggcataaggagctggcaccagtgccagagtgcatcaggggaggactgctttgcaatatctagcacttacctcttagagtatgtttcattagggacaacagatataaatggcagacaagtgagtcccttcagtaacaggaaatagaaatcatcaagaggaacagaaacagatgtcagcagccctcatataaagtcatcatccttcatccagttaaaacctgagacagttctcacataagaaggtctaattcaaaaagagactgggttctcatgaggcaggttcatgcaaaaccaagggaagtatacaactttgggattctccagcttcccttggaaaagacctacaatcatttgcttaggtaactgagcactgaacaaaggtgagtattgttatctttcagaagctgttggccatgaaggtcttgctggcataaaacccatggttggaaacatcaccatgacccctgttagagtaatggcctaagggcaagggtcaggaaattgatgtattccttgccaacttctgcgagacgagtgttggtccactcatctctttcacggaattcaccagtctggtatcttcaaaatccagaaggatgatggcagatggcaggaaactaatgcaaacaccatcagttgtacctccactgtagcagcagtaatggatgttatctcttcattgtaatatccagggagggagaagatgacattattctcaatattctaaacaccctgtgtgtacagcctctgtgatattttttgtaatatccgtgtgggagagaattatattactcctaatatctcaggggttgtgccccctctgtgacaatgttcctaacacccaggaggggataggatgatatcacttttagcatcacagggggtgtacaccccactgtaatattgttcataatatccgggggggagagaatgatattactcccaatatcgcaaagactgtacaccaacctgtgatattatttgtaatatccataagaggaagaataatattactcccaatgtcacaggaagtgtacacccttctgtgatattgttcaaaagatccagttagggaggggatgatattactctcaatatcttaaacaccctgtaggtaagccctctgtgatattcctcataatatccagagggagaggatgatattactcccaatattgcatgaagtctacaccccacctgtgatattgttcctaatatccaggatgggagaggatgatattactcccaatgtcgcaggggatgtacaccttccctgtaatattgttcgtaatatctagaaaaggagaggataatattactttcaacatcgcagggggtgtacaccttccttgttatattgttgctaatatccagggaaaaagaagatgacattaccaccactattgcagaaggtgtacacccccccttgatatagttcctaatatccagaaaaggagaggagatattactccaaatattgcaagaggtgtacattcccctgtaatatttttcctaacattcaggaagaaagagagtgatattgcccttaatattgaagggagtgtgccccccccgtgatattgtttctaatatccaagaaatgaaaggatgatattactcccaatatcacaggggctgtacagccccctcccatgatattgttcccaacatcggggggggggtgaaatagtattattcccagtatcacaataggtgtacacacctgtcgtgatattgttcctaatacccatgggggaaaggacgatattattcttaatatctcagagggatgtacaccctccctgtgatattgttcctaatatccggggtgggagaggatgatattacccccaaaatctcaaagggtgtacacccctcttgtgatattgttcctaatatccagggtggagaggataatattattcccaatatccaggaaaggaaacgatgatgttactgtgaatattccagggggtgtcctcccctctgtgatattgttcctaatatccaggttggggagattatgatatttctccaaatatcacaaggggtgtacaccaaccctgtgttattgttcctaatatcgatggggggagaggacgatattactcccaatatcacagggggtgtacaccacctttatgatattgttcctaatatccatgaagaaagaggatgatattactttcaatatcgcaggggatgtacactccccctgtgatattgttagtaatacctaggagaagaaagtgtgatattactcccaatatcgcaggggatgtacacgcttcctgtgatattgttcctaatatttagggggaaaggggatgatattactcccaatatcgaatggtgtgtacacccccccgtgattctttttttttttttttttttttttttgagatggagtcttgctctgccgcccagactggcgtgcaatggcgcaatctcggctcactgcaacatttgcctcccaggttcgcacgattctcctgcctcagccttcggagtagctgggattataggcagctgtcaccataccaggctaatttttgtatttttagtagagttggggtttcaccatgttggtcaggctggtcttgaattcctgacctcaaataatccacccaccttggcctcccaaagtcctgggattacaggcataactttccctgtgatattcttcctaatattcaggaagaaagaggatgatattgctcccaatatcgcagagagtgtgcactcctcctgtgatatggttcttaatattcagaggaggagaggatgatattactttctatattgcagaaggtgtacacctccctcgtgatgtctttcctaatatccagtgggggagaggttattagtctcaaaatcacagaaggtgtaaacccccatttgatattgttcctaatattcaggggtggggagagaaaggtattactcctagtatttcagggcatgaacacccccaccgtgatatcattcctaatatccagaaggggaggcaatgatatttctcctaatatcacaaagggtgtacaccccttctgtgatattgtaaatattctgtgtgtacacccccctgtgttatagtctgtaatatccgggtgggggagagggtgatatttctccccatattgtaggggatgtacacccttctgtgatatggttcgttatatccagggaagaaaaaggtaatattgctgcccatattgtggagagtgtacacccccatgtaatatggttcgtaatatccaggagtggagagggtgatactgctccttacatcgaggaaggtgtacaccttattgttatatgattcgcaatatccaggggaggagagagtgatattgctccccatgtcgcagggggtgtaaaccctccgtgatatgattggtaatatccaggaaaggaaagggtgatatttctccccatatcgcgggggacgtacatcctcctgtgatatggttcgtaatatccaggaggaaagaggaaaatattgctcttcataacccgaggggtgtacaacccctgtgatatggttcgtaatacccagaagtgtacacccctctgtgatatggtttgtaatatccagggggttagagggtgatattgctccccatatcgcagtgggggtacacccccctggattggttcataatattcatggggggagaaatttacatttatcctcatatcagggggggtgtacaccccccgtgatatggttcgtaatatccaggggaagaaagggtgatattgctccttatatcgcggaaggatcaccctcccctgtgatatggttcataatacccagacgggaagagggtgatattgttcttcataaagcgaagggtgtacagccccctgtgatatggttcataatatgcaaaaggggagagggtgatattgctccccatatcacggagggtgtactcccttctttgatatggttcgtaatatccaggggtgtagatggtgatatagctcgccctattggggagggtgttcacccctctgtgatattgttcgtaatgtccagggaaagagaggatgatattactcccaatatcgcagaaggtttacaccactctgtgatattgttcataatatccagggaaggagaagacgatattactcccaatatggcagggggtgtagaactcctgtgatattgtttgtaatatccaggcaaggagaggatattactctcaatatcgcagaaggtttacacccctatgtgatactgttcatgatatccagggaaaaagaggatattactccctatatcacaaagggtgtacacccctttgtgatattttttgtaatatccaggggagagaggataatattactctcaatatcagaaggggtgaaaaccctcctgtgtcattgttcataatatttagggaaggagagagtgatattactccaaatatcacagtgggtgtacacccccctatgatattgttcctaatttccagaaggggagatatgatattattgccaatatcgcagaaggtgtacaccttactctgacattgtttgtaatatccagatggggaaatgatgatattactcctaatatcacagggggtgtacacccccttgttttattgtttgtaatattcaggggaagagacgattatattactcccaatatcgcagggtgtgtacaacactctatgatattgttcataatatccaggggaggagaggaagtgtacacccccccgtgatattgttcgtaatatccagaggtagagaggatgatattactcccaatattgcaggtggtgtacacctttctgtgatattgtcatgatattaagaaggggagaggatgatattactaacaatatcacaaaaactgtacactccctgtgatattgttcataatatccagaagaagggaggatgatattattctgaatctcgcagaagatatacaccaccctgtgatatggttcataatatcctaggggaaagaggatgacataactgtcaatatcgcagggggtgtacaattccctgtgatattgttcacaatattcagagggaaaaaggataatattactttcaatatcgcaggcggtgtacacattactgtgttattgtttataatatccggaatgagagaaaattttctcccaatatcacaggaggtgtacactcccctgtgatattgttcgtaatatccagggaggggagaggatactattactcccaacatctcagggagtgtaggccccccctttgatattgttcctaatattcggaagtggagaagatgatattacttccaaaatcgcagggggtgtacactccctctgtaatattgtttctaatattcatgagtggaaagaaagatattactcccagtattgcaggggacatacaccacactgtgatcttgttcacaatattcgggggggagaggatgatattactcccaatatcaaagtaggtgtacacccccttctgatattgatcgtaatatccagaattaaagatgataacgttactcccaatattgcagggggtgtacatttttgaatactgttcataatattaagagggggaggggatgatatctgtcccaatatcgcaaagtgtgtacacctcctgtgacattgtcccaaatatccagaggaaaaaaggatgttattactcttaatatctcagagagtgtacacctccctgtgatattgtttgtaacatccagaagaaagaggctgatattactcttaatatcgcagggggtgtacacccccgccccgggatattattcgtaatatccagggggaagtggaatgttcagaatgggagaggatgatattacttgcaatatcatagtgggtgtacaccccactgtgatattgtttgtaatatccgggaaaggagaaaatgacattcctccccatatggcaggggctgtacaccacctatcatattgttcaaaatatccagaaggggagaggatatgtctccaagtatcacagggggtgtacaccccgctgtaatattcttcctaatatccagggtgtgagaggataatagtactcccaatatcccagggcatgtacaccccccttgtgatgttgttcctaaaattcatggggagaaagaatattactcccaatatcacagggggtgtacatacactctgtaatattgttgccaatatgcagcaggagagaggatgatattactcccaatatcacaggggctgtacaccccgctgggatattgtttctaatatcaagggggaaaaaggatgatattactcccaatgtcgcagggtgtgtacttcctctttgtgacattgttcctaatatccaggagagaagagggtgacattccttccaaaactgaaaggggtgtacacaccctttgagatattgtctttaatatccagaacgaaacaggatgatataactcctaatactgcaggggggtacaccctctctgtgatactgtttctaatatccaggaggggaaagaaaaatattaatcccaatatcacagggggtgtacattccccctttaatattgttcctaatatccaggaagacacaggatgatactatttccagcagcacagggcatgtacacccctttgtgatattgttcctaatatccaggaaaagagaggatgatattactgtcaatattgcagggcgtatacactggttctgtgatattgtttctaatatccgggggtggagaaaatgatattactcccaatattccagcgggtgtacacccgttctatgatattgttcctaatatctgggggagagagaatgatattattgtcaatatcacaggggatgtacagattccctgtgatattgtttctaatattcacagggggagaagggtataatactcccgatatcgcagggggtgtacactccccctgtgaagttgttcctaatatccagggattgagagaatgatattactcccaatatcacaggcggtgtaaaccccctgtgtgatattgttcctaacatccagaggaaaagatgatgatattattttcaatatcacagggggtgtacgcatccctgtgatattgtttctaatatccaggggaggagaggatgatattattgttaatatcgcagggggtgtaccccaccctgtgatactgttcctaatatccggggtggaagaggataatattgctcccaatatcgcaaagggtgtacaaccttcctgagatattggtcctaatatccagggagggagaggatgatattactttcaatatcacagggagtttacacaacccctgcgatattgttcctaatatccagcggaagaagagttaggataatactattttcaaaattgctgggtctgtaccccctccccgtgatattgtttctaatatccaggaggggagaaagtaatatgactcccaatatcttagaagatgtacaccctccccataatattatttcttacatccagggggtagaggatgattttgctttcaatatcacagagggagtaaacctttccggtgatattgtttttaatatttaaaaagagagaagataaaattactcccaatacaaaggggatgtattgtgtactcccccctctgatattcttttttaatatccagatggagagaggatgatattactttcaatattgcatgggatgtataaatcccctgtgttattgttctgaatatacaggtggggagagtatgatattactccaaatatcgcagggggttctttccccctgtgatattgttcctaacattcagggagggagaggatgatattactcttaatattgcagggggtgtacccacgcctatgatattgttcctaatatccagagggggagaggatgatctaactcagaatatgacaaggggtgtacacacagcctgtgatatggttcctaatatacaggggagaaggggataatatttctcccaatatcgcagggggtgtacaaccccctgtgatactgttcctaatatacagaaggggacagcatgatattgttcctaatatcgcaggaggtgtacaacgccctgtgatattgttcctaatatccagggcgggagaggatgatattaccctcaatatcgcagggggtgtgcactttccctgttatattgttcctatgatccgggtggggggaaatgacattagtcccaatatcgcaggatgtgtgcaccgctcccccgtgatattgttcctaatatcaagggggagagaggaggatattactcccaatatcgcaagggatgtacatcctccatgcgatattgttcgtaatattcaggaggagagaggatgatattactcttaatatcgcagaaagtggacacccaccctgtgatgttcttcataatatccagggaagcagacgattatatgactttcaatatcgctgggagtgtacatcccttttgggatattgtttctaatatccaggaagggagaggattatattactctcagtattgcaggcagtgtacaccttttttgtgatattgttcctaatattcagaaagggaaaggatgatattactcccaatattgcaggtggtgtatatccccctctgatattgttccttatatcaaggaagagaaagaataatattactcccaatatcaaagacagtgtagacccctcctgtgatattgtatttaatatccatggggaaagaggatgatgttactcccaatatcgcagggggtttacacccacactgtgatattattcctaaaatccagtggaggagaaaataatattgctcccaatattgcagggtgtatacaggccctcccccgttatattgctcctaatatccagcggtggagaggatattactttcaatttgtgtagggagtgtatacccccctgtgatatttttctaatatcaaggatgggaaaggatgacattactcccaatatcgcaggaggtgtacacgccctgtgatattgttcctaatatctagggaaggagaggatgatattactttcaatattgcaggagctgtacaccctctgtggtattgttcttaatatttaggttgggagaaaatgatatgagtccaaatatcgcagaaggcatacacacttccaataacattgttcttaatatccgggggagagggtgatattactcccaaaatctctggggggtgtacacccccttctgatatttttcctaatatccagggaaggaaacgatgatattactataaatattccaaggagtgtacaccttcctaatatcctaatattgttcctaatatccaggggtgggagaggattatattactcccgatatcgcagtgggtgtacacccctcctgtgatattgtttctaatatccaagctaggagaaaatgatatcactctcaataccacagggggtgtacaccttccgcatcatattgttcctaatattcagagggaaagaagatgaagttactttcaatatcggaggggttgtacacaacccctgtgatattgctgctagtatccaggaagaaaggggattatgttactccccttatagcagggggtatacacctcccctgtaatattgttcctaatatcaaggctgggatatacgtggggggaaggatgatattactcccaatatcgcaggggttatacaaccttctgtgatattgctcctagtaaccagggcagaagaagatgatattactcctaatatcgcaggaggtgtacactcccccattatgttgttcccaatatgcagaaaaggagaggatgacattattgccagtatcgcagggtgtgtacaccacccctgtaatattgttccaaatatttagggggagagaggatgatattactcccaacatcgcagggggtgtacacacatcccctgtaatatagttcttaaaatctaggggaaaaggggatcttatttctctaaatattgcagagggtgtacactccccggtgatattgttcctaatagccgggagggagataattaaattactttcaatatctcagagagtgtacatcgcccttgcgatattgttcctaatatccagagcaaaagagaatgatattactcccaatatcttaggagtgtacatttaacctgtaatattgttcctaatatccagggggaagagaatagtattactgccaatatcgtaggggttgtacaccttttctgtgatattgttgcaaatatttagtagagggaaagaatattactcgcaatatcacagggaatgtatacttcccctgtgatattgttctgatatccagaaaaagagagggtaatattactcccaatattgcagggggtgtacaccccccttgtgatattgatcctaatataaaggaaggaagaggatattactcctcatatagaaggggttgtccaccccccttgtgatattattcctaatattcagggaagcagaggatgatattattttcaatatcacagagggtgtgcagtccacctgtgatattgttcttaatattcggggggagaggatgttattatgcctgatatcgcagtagaggtacacccctcaagtgatactgttcctaataaccaggggtgaagaggatgatattactcccaatatcgcaggtggtgtacacccccccatgatggtttctaatatacagagggggagaggaaaatattactcccaaaatcgctggaggtctacaccccccttgtgatattgttcctaatatccaggaaaggaaacgatgatattactgtgaatattccagggggtgtacacccgctttgtaatattgttcctcatatccagggtgtggagaggattatattactcccagtatcgcagggggtgcacgacgcccctgtgatattgtttttcatatccaggaggggagattattatcaatatggcaaggggtgaacaccccctgtgatattgtacttaatagttaggttggcagaaaatgatattagtctcgatatcgcagggggtgtgcactccgcctggtgatattgcttttaatatcaagggggagaaaatggcattactcccaatatcgcagggggtgtacaccgctcatgtgatattgttcctaatatccaggtggagagaacataatattactcccaatatcgcacaaggtgtacacccctcctgtgatatggttcctaatatccatgggaggagatgatgatattactcccaatatcacaggggatgtacaccacccttgtgatattgttcctaatatccagggaagaaaacgatgatattattgtgaatattacagggagtgtacacactccctgtgatattgtttttgatatacagggtgggagaggatgatattactcccaatatcacataaggtgtacaccccccgtgatattgttctaaatatttcggtggggagaaaatgatattagtctccatatcacagggggtgtgtgctcctcaggtgatattgtttttaatatcaagagggggaggagattatattactttcattatcacagggggtgtacacccctcctgtgatattgttccttatatccaggcgaggggaaaataatattactctcaatatcgcaggaggtgtacacaccccatgtgatattgttcctaatattaagggggaaagaagataatattactttcaatatcacagggtttgtactcctttcttgtgatatagtttttagtatccagggggaaagagcatgatattactcccattgtagcaaggggtgtacacacctcctgtgatattgttcctaatatccagaagtggtgaggatgatattactcccaatatcgcagggggtatacaccccacctatgatattatttctaatatccatgggaaaagagtatgatattacacccaatgtcgcagagggtgtgtatttttcctgtgatattgtttctaatattcaggcggggagaagatgatattactctcaatatagcagaaattgtacatccccgctgtgatattcttcataataatcagggaaaaagaggatgatattactaccaatattgcaggggggttacacttcccctatggtagtgttcctaatatccaggaagaaagaggatgatattaatcccattatccaggaagtgtacacccaccctgtcatgttgttcctaatatccagcagggaagaggatgatattacaccccccccccgtgatattctccttaatatccaggaggggagaggctgatattactggatatatagcaggggtgttcataccttctgtgatattgttcctaatatccagaaaaggagaggatgatattacttccaatatcgcagaaggtgtacacctccctgtgatattgatcctgacattcagaaggggagaggatgatattactcaaaataccgcagggcatgtgcattcccttgtgatattgttcctaatacccagaagggaacaggataatattactttcaatatcgcagggagtgcacacccccctttggtatggttcttaatatccagaaggaaagagggtgctattactttccatattgcaaggggtgtacaccccactgtggtatggttcataatatccaggcagggagagggtgctattactccccacagtgcggggcatgtacaccctgctgcggtacggttcctaatatccagggggagagaggatgctatgactccctatatcgcggggtgtgtacacccctgtgtggtatgttttgtattctccaggaacggagagggtgttgttacccctcatatcgctggaaatgtacactcccctgtggtatggttcgtaatatccaggggattgagggtactgttacccccatactccccatatcgtggggggagtgcacctccctgtggtatggttcgaaatatccagggtaagagagggtgctattattccccattttgcaggaggcgtacacccccctatggtatggttcgtaatatccggggtgaggggatgctatcaaaagaagagagaaagagaccccccatattgttctatattattttatactcagtacctgttttaagaagaaacaaggaagtgaaaccaaaagcaggcagcccggcgccaggcaccagacccaaaaccagacccgaaaccaggcctgggcctgcctgaccttagcctgatagttaaaattcaacccatgacctagcaaccaatgttatccatagattccagacattgtatggaaggacattgtgaaatttcttgttctgtgctgtttcactctgattaccggtgcctgcagcccctgtcacatacccactagattgctcaatcaatcatggccctttcatgtaagatctttagtgttgtgagcccttaaaaaggacagaaattgtgcactcaacaagctcggattttgagacgctagtctttcgatgcttccagctgattaaaagccacttccttcactacctcggtgtctgtggggttttgtccgcgactcctcctgctacactatgactccccatatcaaggggggtgtacacccccctgtggttcgtaatatccagcaggggaaaaggtgctattactccccatattgcagggagtgtacacccccttgtagtatggatcgtaaaatcaaggggggagggaaggtgtaattatccccatatctcagggggtgtacacccctttgtggtaaagtttgtaatatccagggatattacagggatattatccccaaattaatacttttataatttcttatgcctgcctttactgcaatctctgaacataaattgtgaagatttcatggacatttatcacttccccaatcaatacttttataatttcctatgcctgtctttactttaatctcttaatctcatcatctttgtgagctgaggatgtatgtcgcctcaggaccctgtgatgattgcattaactccacaaattgtttataaaacatgtgtatttgaacaatatgaaatctgggcaccctgaaaaagaacaggataagagcgatgttcagcgaacaagggagataagcataaggtctgactgcctgtggggctgggcagaacagagtcacatttttcttattgcagaaaatgagtaggagaaatatcactgggaagggaacgcattcctaggggaggcctatggacggccgctctgggggtgtatcccttatgtggttgaagataagggatgaaatacaccctggtcccctgcagtgccctcaggcttgctaggattagaaattccagcctggcgaattctagtcagaccagttctctgctcttgaaccccgtttcctgttaagatgtttatcaatgacaatgcgtgcacagcaggacatggaacctcaatagtaattccattttctccctggccttgtgaccttgctaggcccttctgcccttgtgatcttttattgccatttgaagcatgtgatctctgtgacccactccctattcgtatccccctccccttttgaagtccctaataaaaacttgctggttttgcagatcaggtggtcatcacagaacctgccgatatgtgatgtcaccccggaggctcagctgtaaaatttctctttcgtactctttcactttatttctcagaccaggtgacacttaaggaaaatagaaaagaacctactttgaaatattgggggctagttcccccaatagacattgttcctaatatccagaaaaaaagaagatgatattactcccaatatcacaggggttgtgaaccccacctgtgatatggttcctaatatccaggaagggagagaatgatattactctccatattgcagggggtgtgcacatccctgtgatattgttcctaatatccaggggaggagagggtgatattactcccaatattgcaagggttgtaaactccaccctgtaatattgctcctaatatttaggatttagggggggagaggataatattactcccaatatcgcaggggatgtatatgccctctttgatattgttcctaatatccagggggggagaggataatattactttccatatcacaaagagtgttcacccccctgtgatattgttcctaatatccaaaaaggaagaggatgatatcaatcccaatatcacaggaagtgtacaccccccccttttatattgtttctaatatccaggggaaatgagggtgatatttctctcaatatagcagaatgggtacactccccctgggatattattcctaatatccaggggaaaaaaagaggttgatattcttcccagtatagcagggaatgaatacaccctttgtgatattgcttctaatatcaaggggaaaagaggatgatatgactcccaatatcacaggggatgtaaacctgtggcgttgttgctaatatcaaggagggaagagtatgatattactcctaatgtcgccgaaggtgcacactttccctgtgatattgttcctaatatccaaaagggaagagaatgatattacccccagtattgcagggtgtacaccacccctgtgatattgctcctaatacccaggaaaaaagagaatgctattacccccaatatctaaggggacgtataccttccctgtgatattgtttctaatatccaagtggggagaggatggttttactctcaatattgcagggagtgtacactccccctgtgatactgtttctaatactcgggctgggagaaatagtattactcccaatatcgcagtgatattgtttccctgtgatattgtttctaatatctagtgggggagataattatattactaccccatacacaggggagggtgtacattcccctgtgatattgtttgtaatatccagggaaggagaggatgttactcccaatatcacaggggttgtacaccccttttttgatattgttcctaatatctggggggcagagaattatattactgtcaatatcacagagtgtgtacaccccctctgttatattactctttatattcagggcggtagaggatgatattactccctatatcacagggggtgttcacccctcctgtgatattgtttataatatctaaggggaaagaggatgatatcactctcaatatcaaaggaaatgtacacctttcctgtgatattgtttttattatataggggggcagaggatgatattaagaacaataccacaggggatgtacacccacgtattgatattgtccctaatatgtatggggaaagaggacagtgtaactcccgatatcgcagagtgtgtacacccccttgtgatattgtttctgatatacacggggagaaaagataatatttcttccaaaattgcagggggtgtacaaccccctgtgatattgtttttaatatccagtgggggagagaatattactcccaatattgcagggcgtgtacacaacccctgtgatattgttcctaatatccagagtaggggaggatgacattactttcaatatcgcaaggggtgtacattcccctgtgatattgctcctaatatccatgaggggagaggatgatattattcctaatatggcaggggctgtacaccttccctgtgatattgtttctaacatccagtgggggagaaaatgatattactccctatatcacagaaggtgtacactttccctgtgatattgttcctaatatccagaaggggagaggataatattactcccaatatcgcaggaagcttacaactcccctgtgatattgtttctaatatccagggaggtagggatgatattactcccaatatcgcaggggatgtacactcccccgtgacattgtttctaataaccagggggtgagaggatgatattacgcttaataccgaagggggtgtacacacccttgtgatattgtgcctaatagccagggggaagaaaattatattaattttaatatttatggggaaaaaggatgatattactcccaatatcacaggggctgtacaccgaccttttgatattgtttttaatatccagaagagaagaggataatattgctcccaatatcagaaaaggtgtaaaccccttctgtgatattggtcctaatatccagggagggagagaataatattactaccaatatcacagaaggtgcccacccccaaggtgatattgctcctaatatccaaagataatagggtgatgttactcccaatatcacaggaggtgttcacaccccttgtgatattgtttctaacgtacagggaagggagaggatgatattattcccaatatcacaggaggtgtatactcctctgtgatattgattttaatattcggggggaaaggatgatattactccctatatcgcagagggtgtacaccctctgtaatattgatcctaatatccagggcgggataggatgatattactcccaatatcgcagaaagtctacacaacccccagtaatattgtttttactatccagggggaagaggatgacattactcccaatttcacagagtgtgtacactcaccatttgatattgtttctaatatctagggggagagaatatattactcccaatatcacaggaattgtacaccacctctgtgacattcttgtgaatatccggggaaaaagagaataatattactcccaatattgcagagcgtgtacacccctccatgatatcgatactaatatttttttaaagaggatgatattactcccattgtcacaggatgtgtacaccccccttgtgaaattgttcataatattctggggggagagcataatattactccccatatcgaaaaaggtgtccaccctccttataatatggttcctaatatccaggatattacttaatccaggatacttgtaataccctaaatatacaattgcttgaacctccacctcccaggttcaagcaattcttctgcctcagcctcccgagtagctgggactacaggggcacaccaccacacccagctaatttttttttcttgtatttttagtagagatggggttttgccatattggccaggctggtctcaaactcctgaccttgtgatctgcccacctcagcctcccaaagtgctgggattataggcgtgacccaccgtgccaagccaggaagaggatgctctatagatttccccaataagagatggctttgcagggccattccaaaatatgtcaaagaaatacatttggggataaaatactttgatttcctttagggaatgttatctattatgtgatgctataccagagtcaggttggagtcggttatcttattgcaacaaagagtctgttccgtcactgttgggatctctattttttcctcttatttcttgagacagggtctcactctgtcacccagtctggagtgcagtggtgcgatcttcattcactgaaacctctgcctcctgtgttcaggtgattctcgtgcctcagccccttaagtaactaggattacaggtgtgcgccaccacacccagctaatttttgtattttcagtagagatggtattttgccctgttggccaggctggtcttgaactcctggcctcgtgtcatctgcccacctcgacctcccaaagtgctgggactgcaaatgtgagctattgtgcccagccaggatctctgttttaatgttagtgctggtcactttgcatgaactccaaagggaagaaatataatgaggtgtgtctgaccccctgccttctcatcgtgacctgaattagtttttcaggtttgcaggggatacccttggacaagaaggggctctattcggttggttggggggattagaattttactttttgtttacaatatttctcctgaaagagttaggggctcacaaggaatttccgcgtgagcaacttatgaggaaagccatctgggaagatatgtgtccttgtgtcactgggatattctcgtttaccccaatgatacggcaatgacgcagggttgtgaaattacagctatgtgtttggggaaaaaagaaagcaggattgtgtgactacgtttccaaacttcacttgcccttagccatagtgagttgggggcctggagattctgttttctttcacaatgatatagatacaattaaatgtatagaaagcaaaaaaataaaaaggtgagtaatgaggaacctctgattcctgagtggccatgtagttacccatggcacagagccacagttactgaaggtaaagtttgctggggaatttagaaatgaatccagctcttggaggagtcagtttactggatgcctaagaaaatgcaaacaaaataagaaaaaagggtaatattcaatcccatagttattgttacctgtcatagctaaagtaaaattaaaacagagtgctggcttcaatcttgatgctacactaagcttagatttcagtgaatgtgagtctcagccactagctcagagccacctcccaaagaccaaatcatgtagggacaatagaaagtacttctgagaattgtggttaccaagaacctagtaactgttggggaggagcaaaacaaagtacagaaaccagagggtacaatctgagtgagactgctatcagcttctggaggagcctttactaaaatgaatgatgagagtaactggatgatgagagtaactaatggatgatgagagtaagcaatgtctttggttttcttttttttttttttttttttttagcagacgtctcactcttgtcgcccaggctggagtgtaatggcatgatctcgcctcactgcaacctccacctcctgggttcaagcaattctcctgtctcagcctcccgagtagctgggactacaggcactcatcaccacacctggctaatttttgtatttttagtattttctggtgagggtccaggtttccggaaacaactcagagacatatgttaagatgttatctttagttttcacagggaaccaaatatgttacgactccaatttccttggctattgttttaagttaccattaccttctcgttgatcaagttgctcatttacttctcaagcctagctagatgcctggaatttcccttgaaggaagtcaagattttcctttatctccatactggctgatggtgatcgagtaagcccctaagaggggtccctgctccatctcgagatgctgctagattctacagtgcctaataaacagctctcgcctggccgacaaagagctgcttgctctctggatagcaattccaaagtgaacagacaacatcctgtttggaagactgccactctgttagaagaagcatcaggaaaacctttcttttgagctatttataactaacagcaattgaccaagtatacttttgtgagtgaaactgacctttctccctgtaagaattctccaaaatttggaaactatttgtgagtatttttacttatggcaatataattattggcacaagctcaatcagattcggttttctttcgtaacaggaaccattggagatactcattactctttgaaggcttacagtggaatgaattcaaatacgacttatttgaggaattgaagttgactttatggagctgataagaatcttcttggagaaaaaaagactgggtatattttcaatatgctttccttttaaggtccctcacctgtggaaagtaaagaatgtcactttctgacaggctcaggaacctcaagttatgtagggatctcaagaagatgggggaattcacccagttcatacaggtgaaattgctgttgcaaagattatgaatatgagagaagtccagcatggctgacttcatctcgtgtctggcctcaggctggctgcccttgctcactcttgggcataggccaagctagccatgggaggaatttagtttatagtttaactttgaagcacggatgataatagtctctccctaaaatgaaccccttccttgctcagggactgaaactacctttgtatgacaaatgaaagcccacaagattaagattatgagaggggcctgaattctgctaaaatgcaggtgtagctgactgataacaagtcattgtcccacagcttgcctttctataatctcttgcttctcaggagtcacatggccagaggtcctgagatttccagtcctgtgacccccacccagagatggacttagtgcatgaggaccattttccacacccctatgatttcatcctcaaacaatcagcagcaaccattccctagccccctgccttccaaattatccataaaaatcctagcctctgagttattagggagattgattaataatcccagtcctaccccttgggttgctctgatttaattaaaccttctctactgcaataccacggactcagtaaattggttttgtctgtgcaatgggcaagaagaacatgttgcatggttatacaggtactacaagcacagtctgatggcaaattattggttttgcttcctgcccttgatgtttctaaacatctagtccaaaattacttgtgaaaggtccagcaaagccaattttaaaagaggctatatggccaatcactattctttctacacattattgcaaataatcaggccacggctgggcacggtggctcatgcctgcaatcccagcactttgggaggctgaggcaggatcacctgaaatcaggagttcaagaccagcctaggcaacatgataaaaccctgtctctactaaaaatacaaaattagccaggcatggtggcatgcacctgtaatcccagctacttgggagactgagggaggagaatcacttgaacctgggaggcagagattgcagtgagctgagatcacaccactgcactccagcctgggcaatagagtgagactttgtctcaaataataataataataatcagaccaagtataatgaaattaaaatttattttgcaaataaattggtcctactacaatttatccttcatagaaatgtggaaactgaagataaaaaaaattaggtttcagaagaaaactatactacacctgttattagattctagccctaaacattgtttttgaggtttttattatttacctgcaatttggtctaaattctgaattatttcctgactacaagtatccaaggaataaatgggttttctttttctttatgatagttttagttggcttctaatgcaacaacaatttttattgtaatcctgtgtgcattctattcctactattcaaattattaatgttatagatctttcattgtagtacttctgaattaaccaaaatcacagtattctgaagatgattctacaaagcctgctgtttctacaaaggctgctgatgatttctacaaagcctgctgtagtgttgctgtggcctctgcttaaaaaagtagaaaacacattgatgcagcatgttcaccccaacctccctgcctaaaggctcagggaccatcttggaagaggaaggcgcgtgagattgtaagagccgaattagggggatggagtgtggagaataaggacacttcatcttggatgctcacctgccaaattgacttctgatgaaagccagctccagaaatgtgcctacagttactactttcacctaaaccctgcccttagtcaaatccttctcttcttctaagcaatcaacttcaattccttgtataacccacagtataaaagggcttttataccattctatcctattgcatgtaagccttgggtctgggaggtaacagtgtgggattccaccatctcatctccctgccacccaaacatgcctgctcttctttaagcaatattaaatgtttgtacttcagaaatttgatttgtcagcctcttcttcagactctcagcttctttggcctttgggagtaaatttgcataggcctgctcaaaacaggatgttctgggggtttgggggtgttgttttgttttgttttttgttttgtttagagacagggtctcactctgtcacccaggttggagtgcagtggtgcaatcatggcacactgcagcctcaaactcctaggctcaagcaatccccccaccttggcctcccaaagttctgggattacaagcataagccaccatgcccagccctggacttttctttaaagacatttacacagtgtaggaattactgtgggtgcactgctcaggtccccttctccaggatgctcattcctacctcatagatgattttcctgcagagatttgacctcagctgaagggcagtcacctggtccaggtggttgctattcacctccttcctgagaacagccaacagccagggacacgctagcacagagatataagagcgaccaaggtgaggccccttctgtgctgcggtgcatgctccagagcctccctgggatcagacttaagagggtctccagccagatctggtcttcgctgctttcctcgagctccccagcgcactcctgcaatgcatcttttttttttttttttttttttttgagacggagtttcactcttgttgcccaggctggaatgcaatggcgcaatctcagctcaccacaacctctgcctcgcgggttcaagtgattctccttcctcagcctcccaagtacctgggattacaggcatgcaccaccacgcccagctaattttgtatttttagtagaaacgggtttctccatgttggtcaggctggtttcgaactcctgacctcagttgatcctcctgcctcagccttccaaagtgctgggattacaggtgtgagccactgtgcctggcccaatgcacctcttgaatcacctcctcatgctttgcttttagagaacatgatccccaacatgtgattccagcaaagattctagaaagccaaccgtgacaatcacttctgggtttagatgacccccccccaccacaagatggcagtgagcacctcatcacagaggtgctgatggtctgcagcaccgcgccaggccagaacgtgccttttacagaagaaaataacccagtagctgactaggatggtgaggagggctggtgagcactgcggtagtgagagggacactagcatcactgagatgcaagtgatggtcatttttcataggtcaaagctcaaagcaggggacagttacagggcagggcttcatagcaccagtgtgatgaaagtatctgggagtggctaaggccagcactatgccatgggaagcaaggtgggcctgaggaggaggcagcagcgtcagcctgcaacaagtgggggctgccctgcagagacctaagagtcatgttatagagcacagtgtctgtaaggccaagaagtgtggacagccaagtgtgtcaattactagacatactcaagaggagcaggaagggcagggcatggtggctcatgcctgtaatcccagctacttgggagactgaggaaggagaatcgcttgaacccgggaggtgaaaattgcaatgagccgagatttcgccactgcactccagcctgtgtgatgggagcgggactccatctcaaaacaaaaaaagaaaaaggaaaaagaaaaaaagaaaaacctaggtatacttctcaagcaaataaaaataatcaaaaccaatatcatgcccgggcacaaatttcatatatataacagatttaaatatatgagggtgattatcctctcatatctccatttttttttgtttttccatttttttctttactaaaaaaagttaatgccaatgacacacaatttttttttttttttttttttttgagatggagtctcacttcttcgccctggctggagtgcaatggcgtgatctcgactcactgcaaagtctgcctcctgggttcaagcaattctcctgcctcagcctcccaagtagctgggaccacaggagtgagccaccacacccagctaatttttgtatttttaatagagacggggtttcaccatattggccaggctggtctcaaactcctgatctcaaataatctgcccgcctcggcctcccaagattctgggattataggcgttgagccactgcgccccgcctatgtatgattttttttttaattttattttcataagtttttggggaacaggtggtattttgttacatgagtaatttctttagttgtgatttgtgagattttggttcacccatcaactgagaagtatacactgaacccaatttgtggtcttttatccctcacccccttcccaccctttcccccggagtccctgaagtccattgtatcattcttatgcctttgcatcttcatagcttagctcttgaacccttactttctgtttgagggagaagacatatcatctacaagtagatactgtgtaaacattccattgcatgactatcccataacttatttattatttgtgtttggttatttgctgctatgtaacaaccccactcccaactaaatggtgtgacaattccatgattctgtggatcaaaaattctgaaaagtcaaacccaaggagttttgtctctgctccatgatgctaaagcctccgcaggggtgaggcgaatggctcagggtgactgaaaagctcagggttggaacagctggggatgaggcctctatgtataagatgattcttcactcacaggtctgaaactatggtggggacagccagaaggctcggctcagctgggacagtcacctgagccctacacatgacctctccaacatggtgatcctgaagcagttgggtttcttacacagcatcacacttttcttttttttttttttttttgagatgaaatattgctctatcacccaggctggagtgcagtggcacgatctcagctcactgcagcctccgcctaccaggttcaagcgattctcctgctccagcctcccaagttgctgggattgcaggcgcctgccaccaagcccagctaatttttgtatttttagtagagacggggtttcaccttgttggccaggctagtcttgacctcttgacctcaggcgatccgcctgcctcggcctcccaaagtgctgggattacaggcatgagccaccgcgcccggccaaagctcacacttcttatgattcagccttagatgtcacatcagttcattttccccacacttattagtgttagaagtcacaagcccacccatactcaggggactggcacacagaccccactctcaatggaaggggtgggacaccaccattcctgctgatgggcatttgggtaacttcctgtttgaagctattaagattgggctgctgtggccgggcgcagtggctcacgcctctaatcccagcactttgggaggccgaggcgggcggatcacgaagtcaggagatcgagaccatcctggctaacacggtgaaaccccgtctttactaaaaataccaaaaaaaaaaaaaattagctgggcatggtagcgggcgcctgtagtcccagctactcgggaggctgaggcaggagaacggcgtgaacccgggaggcggagcttgcagtgagccgagattgtgccactgcactccagcctaggcgacagagcaagactccgtctccaaaaaaaaaaaaaaagattgggctgctgtgactattctagtaggtgtctttggtgagcgcctacacgtgtttctctttttctctttagtatatgcccaggaggggaactgctggctcccagataccgtatgttcagggtcacacacacttccacagggttttccaaagcccttgtaccagcacgcactcccagcacctgtgtgactgctccagctgtcccacagtctcatcagttctattgctgatattttcattttagcttaagttatatttaataggaaaattaccgttgcctctgccccccgttcctgcctgtaggagtttctcgtagctgttgctacaggtggccacaaatctgtcacttaaacccacacaaattgatgtccttatggctttggagtcagaagtgtcaactgaaggtactagcagggctgtactgacctggtggcctcagggagcatctgtgctgcttctccaccttctagaggctgctgcatccctcgctccagccccttcctgacaccactcaccctcctacttctgttatcacatcctcaccttctctgtgttcagggctccctctgtctctctcttgcaagcacacttgggattccattgagggccacccacataacccaggagaatttctccacctcaatatccttaacaactgcagagcccttttgccataaaagttaccattcacgggttccagggattgtgacatgggtagctttaggagtgattattcctgcctgtctcccgctcaccagaacttggactttctctctcaacaggagccccctgtgtgggaatagcctgtctcaacgacgccctctataaggacctgcttcctcaaaggacctcatagtcgggtcctgcccctcagtgtccagtctgccttggctggaggggctgcaggggtgtgttggcgccacctggtggagacagggcatcacagcaggtgggagcccagtagaagcacaaccaaaacatgggtaatgtttaaaattttctggctaagcgctgtggctcacgcctgtaattccagcactttgggaggccgaggtgggtggatcacatgaggacgggagtttgagaccagcctggccaacatggtgaaacatcccctctactaaaaaatacagaaaaattagctggacatgtggcgcgctcctgtaatcccagctactcgagaggctgagacacgagaatcgcttcaaccccggaggggttgccgagatcgcgccactgcactccaggctgggcgatagagcgagactctgtctcaaaaaaaaaaaaagaagaggggaggcgaggggaggggaggggaaaagggggaatttgtttggagctgagacatccatcttctcctgacctcagatatttgcactcctggttatgaagccttcacacttggactgaatacaccaccagctttcccgatttccagcgtgcaaatggcagatcgtgagacttctcagcttccataattacatgagccaatttatatatataaattgggtcctccagaaaaacagaataaattatatatataattatacgcataacttaattaaattatacgtataacttagctatatatataatttattctgtttttctgaagaaccctactgacacaaatgttgagcatcttttcatgtgcttattggcttaataacttgtacatcttctttggggaaatgtctattcaagttctttgcccattttgtaactgaactattaatatttgtctttacattgttgagttgtaaaagttccttatatattctagatactagagccttatcagatatatttctgcaactattttctcctaatatataggttgtgtttttattttctttttctttttttttttattgagacagtctcactctgtcacccaggctggagtgcagtggcatgatcttggctcactgcagactcgacctgccaggctcaagcaattctcccacttcagcctcctgagtagctgaggttataggcacttgccatcgcacccagctaatttttgtattttttagtagagccgaggtttcgccatgttgcctaggttggtcttgaactccctgcctcaaagcgatctgtcagcctcagtctccctaagtgctggaagtacaggtgtgagccacagtgcccggccatctattttcaatagtgttttttgatgtacacaggtttggaattttgataatgttcaattcatccatttttttttttttttttttggttctttctactggaccaccactcttgagccctctaatccaacctccacgcggcagccagagggagctctctaaatgtaattactctttccctgctccacctgctcaaaacagtgtcacatttgtgatttaaaacagtatttctcaaacctaatttgcaaacaaagcaggtggaactcttcttgtatgcacagcatctgatttggttggtctggcatgggtctgggagtgagcacacctaccaagcggctgctggggtaacttgcgttttccactgatgatttcagcaatgtttccggtcccacatgctcctccagaaccttgtactcccccatgaaaaggtggagtccatttccccttcctttatttatttttttgagacgaagtttcactcttgttgcccaggctggagcgcaatggcgtgatctcagctcaccgcaacctccgcctcctgggttcaagcaatgcttctacctcagcctcccgagtagctgggattacaggtatgtgccaccacgcccagctaattttgtatttttagtagagacggggtttctccatgtcggccaggctggtctcaaactcccgacctcaggtgatccgcccgcctcagcctcccaaagtgctgggattacaggcgggagccaccgcgcccggctatttccccttcctttgaacctgatcaggacttgacgatggcatcaacatggtgagagtgaccctgcatggcttatgaggctgggttacacaaggcgatgttgcttctgactggctccctctcaggatacatgcccttggaacccatcctctaagctccttgggagcccaacttagcccatgtggagacaagacagggagagaaacagaggcacccccagccctcagccagcatcaaccgccagacaggagagcaaatgcgccaacaatgattccagctgaagcctcagacagcgtggagcagagatgagggatccctgcagattgcagatgcgtgagcaaaatgcatgctgtcactgttttgaaacaacaatgtctgggggctgtttgttatgcagcaatagacagctgtaacaatgctgttactgctgtattccatgaatgactgcactttgagtagcagggggctagatcactagataagccccatggcttctgtgtatgctatttttctacttttatatccttttcattcactttttttttttttttttttgagacagagtctcactctgttgcccaggtgggagtgcagtggtgcaatcttggcggactgcaacctccacttcccgggttcaagcaattattgtgcctcagcctcctgagtagctgcgactatagatgcacccccatgcctggctagtttccgtatttttagtagagacggggttttgccatgttggccaggctgatctcagactcctgacctcaggtgatccacccaccttggcctcccaaagtgctgggattacaggcgtgaaccactgcacccagcctcattcactttctttacttggctcatttttccttgttgcctcaattctcctctaagatcactttcctgacatttcagcctgggcctgttgccttctctgggtcccctccgcctcctgtgcctcccccatctcagccttgatccctcagattatacttcctctgtccccaccctgaccatcttggctgtccctggatagggatgggtatcttctcccactggtctgggagatctggaaggacaggcctggaaaagacttggtcactgctggaaggagctcagttagtgtggtgctgaggacagtacgggtgaggctggccccttcacccaaactcccactctcttccatagatttcacctctgtggcccaggccataggattagggcaactccccttaaacatcgagtccatcctccaagctgtccttttttttttttttttttttttttttgagacagagtctcgctctgttgcccaggctggagtgcagtggcgcgatctcggctcactgcaagctccacctccagggttcactccattctcctgcctcagcctcccgagtagctgggactacaggagcctgccaccacacccggctaattttttgtatttttagttgagacggggtttcaccgtgttagtcaggatggtctcgatctcctgacctcgtgatccgcccgcctcggcctcccaaagtgctgggattacaggcgtgagccatcgcgcccggcctcatgctgttcttgaatagtgagcacctgttacaagtcgccccaccagcctctcacttgtacccccctcatctctttctccccaagagacagaggaccctggcacttgtgaagcatgacccagaccctggggccatggcatccaacatcctcattccccatgacccctactgtctagatgtagctgccaagagacccccagactccccgggcctctgtctagagtgccaagacagagagagaatgccctgccgcttgcatgctttgtggggtgtccttcccccttccctggctgctaggcgtgacttcaacgttctccccaacccccaaacagcagcactgacaccagctgcagacctggctcaggttagctaatgaggaccaggctggggatggagcctgaacccctaaaccccagtcctgtaccccaccctaatcctggggtctccactggacaaaacgaagcagcttggtttttcgttgttattgtttttgagatagagtatctctctgtctcccaggttggagtgcagtggcgtgatctcagctcactgcagcctccgcctcccgggttcaagtgattcttgtgccgcagcctccccagtagctgggattacaggcgcgtgccaccacacccagctaatttttgtatttttagtagagacagggtttcaccatgttggccaggctggtctgaaactcctgacctcaagtgatttcccagcctcggcctcccaaagtggaagcggcttatttttaaggagaaaactcccgtggaaaggaatcagcacctcctctgtcaacatttcacttctctgaaaagactctcacttccaacagaaagtgctttgtaacacaacaatgaggctgggcgaggtggctcatgcctgtaatcccagcactttgggaagctgaggcgagtggatcacgaggtcagaagttcgagaccagcctgaccaatatggtgaaaccccgtctctactaaaaatacaaaaattagttccgtgtggtggcgtgagcctgtaatcccagctactcaggaggctgaggcaggagaatggcttgaacccaggagatggaggttgcaatgagccgagatcacgccactgcactccagcctgggcaacagagtgagactccgtctcaaaaaaaaaaaaaaaagaatgagaacatatggacacagggaggggaacaatacacacaaacaaaatttagaaacaggtgaaaataattttagtaatatttttactaatactgatatgctcaaaatattattatttcaataagtaatctaaaaattattgagatgtcttatgttcttttcatcatactaagcctttaatatttggtgtgtattttacactcacagcacatctcaatttgcagtccccatgtttcaagcactaaataaccatgtgtgtccggtggctaccatactggacagcgttgatctgaaatcgcatctgtatgcatcaccagcatatttgcagagatccccatctcagcagcacacctgaggctcatctgcgaaagcacctgcaacttctctacaacctcccacatcacctccaaacacatcctcatgtcatctgcaaacacacccatagctcacaggccaatgcctaaatatcattgcaggcaccttcagagaaagcacttactaaaggggtatacttgattccacatctgctttgacctgcaaatctcccttctcctttacatacatttgcatctcatttgtatgtcaatctaaatccactggcagagcctcagatcatcatctcaaagtcaggtggatgtggggctgggcaggcctccaggtgttcctcctcctgcttcctctggggctcttgatcctcctcctcttccttgctgctctcctcctcctcctccaatatggtgaccagttcctcccgcagcgcccccatctccagccccaggctgcacagctgtcccagcagctggacatccactcggcgcaggttcccctgccagtaggaaggggacgtcacagggatgccaccccagagagcaaggggtctctccaggacctgggtgagagcaggtcccaactcatgtcctggccacagcgcctgggcagggtcctcactgtgcccatggaccctaactgccttcctgcttctcagagtgtctcttgatctctaactcttctctttgtctctccatttcattgtccctgacttctctctctctgtctcctccctctcttatctatatctgtccctgtttccctttgtctctgtccccatttattttttgtctttccatgcccctgtctctctgtctttatgtgttgccatttctctgcccctgcctttggctctctttctctcgcttgccctctctctgccctccccaactttctcaaattcagtctgtctctccatctctgttcctgctctccgtctctgcttcccacctctgtccctctcttttgggatctccctgtccccacctctgttcccgtccctcactctatgtctgtctctcggtgtctgtacatgcctctcatgtctctgcttctatctctcagattctgtttttcgatctctggccttctctatttttgttcatttccattcattctcatttcctctctttctctttcccttccaaacccctcactcaccagctcctccctgatccacagcagactatcgcaggcacctccagtgtctgcccctgcagtcctgagggtctgaccagggatttccactggggagacctccctcagggcctgggggggtgggcccagccccggaggcaccagtccagcctgattcagctgcctccacagttccatcgtctctgagctatggctgcaaggagcaggaagtagcaaggtccagggtggcctggtcccctggggagctgtgtgcgtggtggagagtaaagggcagagggagtgggatgggggttcctgggaaaggtatcccaaagtccactcttcagagagaatcagctggccttgtgcttttctttttccttctgaagtctaacctcaactctgctcacagggttcaaacatagcctcttgcagaggtctaactccacccttccctgcctgtctcaggcctgacccctcaggggcgctcagtgtctgtagatgcctggcaccctctgtccttccacctgccccccaccaccacttctccagcctctcctcagcctccatttgacctctggcttgcccatagcttggtccttgcttgtcctcttggcacgggtcatcctagggctttcccaccagtgtgcctttgggggcaggaatggctcccaggggcaccaagacagcaatcccttagctggagtgcctgtgtccaggctgctggcctagggccaagcagccaattctgctgaccctggacttgcctatgggtatattatccctgttgagggtgagggcttctgctgtggaaaagtctgggaagcactgcaggcctctctcggccttggacccttccttcagacccaaggtgcatatatatacatatatataatggtagatcacgaggtcaggagatcaagaccatcctggccacatggtgaaaccccgtctctagtaaaacacaaaaaattagccgggcatgctgccgcgtgcctgtagtcccagctactcgggaggctgaggcaggagaatggtgtgaacccaggaggtggaggttgcagtaagccaagatcacgccactgcattccagcctggcgacagagcaagactccatcttaaaataaacaaatgaacaatatatatatatatgtattttgttttttgagacagagtctcgctctgtcatccaggctggactgcagtggtgcaatcttggctcactgcaacctccgcctcccgggttcaagcgattcccctgcctcagcctcctgaacagctggggttacaggtgcacgccaccacacctggcgaatttttgtatgtttagtggagacggggtttcaccatgttagccaggctggtctcaaacccctgacctcaggtgatctgcccacctcggcctcccaaagtgctgggattacaggcgtgagccaacgcgcccagccccaagtcccttttaccatagaaagtaacatagtcacagtgcccagggattcacaggtatggggagagggttcgttattcagctgccacacccaccttcctaaacctgctgcccttccagtttcctcacgtgcacagccacgcccgtctgcttttagtttctcaatctgttggcttaaccttcaaaacaggcccaggatttgagcacttctcaccattccctctgccccatccccattcatctcttgcctagactgctacagcagcctcttttactggtcccctgcatccacccttgccctctaaggcaagggtccccagtccctgggccaaggaccagtaccagcccctcgcctgctaggaactgggccgcacagcaagagatgagcagcgggtaagtgagcattaccgcctgagctccgcctcctgtcacatcagcagtggcattagattctcataggaggcaaaccctattgtgaactgtgcgtgcgggggatctaggttgcctgctccttatgagaatctaatgcctgatgatctcaggtggaacagtttcatcccaaaaccatccccaccccacccccgacccccagtctatggaaaaattgtcctccacgaaaccagtccctggtaacaaaacggttagggaccgctgctctaaggtacattctccacctggcagaaataatctttacaaaatgtaaatccgattttgacactcccttcttcccactgtgaatagaataaaaccctaccaggcctgcaccgtcagcccctgcccacctctcaacccagtctcctatctctgtctgcaagctggttcccacctcaaggcctctctgctctagaggctacctctccctgcagcgcttttcccctagatctttgaatggctctttccttatcattcacttctacttcaatgtcacctcttcagagaggcctttgctgatggccctacacccagtcacttttttttatctgcttctcatcaaaattgccttgctgattcctttgtttcttattcatcctctcccacatccatcctctcccagcccagaatgttgacttcctgagagagggactgggtctgtcctgctcaccatggtaacctcggcatctagaacagtgcctgccatcacgtggtaggtgctcagtaaatattcttggaactaatgaatgaataattctatccacaagacttcacaatggctcttcatgctgcgatctagctttcaactccaaactggtcttgagatctcacctcagtctctaaccttgacatctaacctcttcacccactctcttacctgaccctaatttttaaaaatgacgtggtcagcttttcagccccctcattccctgtttttaggaggtagtgagtggaagctggaagaataagaaagcttggggagactgcaattgcagtcaggaaagaaaggtactctgccgggaagaacaccccatcttctcctagggaaagattgtggagtcctggggtttgttttgtttttcaattttttgttttaagagacagcgtctcgctctgtcacccaggctggagtgcagtggcgcaatcacagctcactgcaacttcgacctccccggctcaagtgatccccccgcctcagcctcgtgagtagctgggaccacaggcgtgcaccaccacgcccggctaacattttattttttgtggatataaggttgccctatttctttgtggagataaaggctcccctatgttgcccaggctggtctcgaactcctggcttcaagcgatgctttcgcctcggcctccacaaagtgctgggttcacaggtgcgtgagcccgacctgtgtctcgttttgaagctcagggagagggcgctgtgagcaatccctaaaccctttaagagtaaaaagtgcgtgcacctttaagaggacggttagaaaacgcggggcgtggccacaggagaataagttcgcgctgaaccaggagcgtgggataagaccggccccttccggttacgaaaccttagcaagatggcggctccctgggcgtccctgcgcctggtcgcccccatgtggaatgggcgtatcaggggcatccatcgcctgggtgcggcagtggccccagagggcaatcagaagaagaaaaggacaatactccagttcctgaccaactatttctacgatgtggaggctctgagggattacttgctccaaagggagatgtacaaggtgcatgagaaaaatcgatcttacacctggctggagaagcaacatggtccatacggcgcaggtgcctttttcatcctgaagcagggaggcgcagtcaagtttcgagacaaggagtggatcaggccagataagtatggccatttctctcaggagttctggaatttctgtgaagtgcctgtcgaagctgtggatgccggtgactgtgacatcaactacgagggcctggataacctcctccgcctgaaggagctccagtccttgtcgctgcagcgctgctgccacgtggacgactggtgtctcagccgcctctacccactggccgactcgttgcaggagctctcgctggccggttgcccccgcatctccgaacggggcctcgcctgcctccaccacctccagaacctccgcaggctggacatctcggacctccctgccgtgtccaaccctggcctcactcagatattggtggaggagatgctgcccaattgcgaggttgtgggagtcgactgggctgagggcctgaagtcagggccggaggagcagcctcgggacacagccagccctgtccctgcctagcctttagccctgtccccactcacgtggcttctcagcgggctgcatggaatgtctggtagctcaccacacttctggcttccatttgtcttcactcaacgtcagggtgggggagtggtgctggccaatcacaggagagagcgtgagttcccagtatttattcctggctgcccttggctaaaggtcacagctcctgtcaccctgtcaggcagccctttccatgcccctgttcaggcctggggaggtaaaggctcaggctgttagtagccgcagagagccacactcaccttgtcaggagactcttctcaaactgtccttatgtgagtgcactgccatttcttgcagggaccctgactgacacaggggctactactgacactttacagggatggttctcccccgtgcagggccgctgtgcccactgcaggacatgcagcatccttcgccccactccactcactaaaggccagcgcaccccaggccccatagtattgctggttatggatttattgactttatgttccaaattcagctttttcagttggctgtttgaagggtacttgcgggggccacaggttggggagggccctggttggggggctttctggcccgttgttcccccttttccagggtctggcccccctttggacctggtttttcccccgttgtcccttttcttaa

SEQ ID NO: 735303 - DNA, 187923 bp, Homo sapiens
ctccaaggctgagggatgaggagacctgctgaggacccagggccttatctttccatcccactccataggtcccagtattgactgatgctgtcttcacctcctagcctcacttttaaccttctggcacccgcccaccactgtccagttcactattgaagccctgccgtccagtgctgcagagggaaaggatgttcttctactggcctgcaatatttcagaaactattcaagcctattattggcacaaggggaaaacggcagaagggagccctctcattgctggttatataacagacattcaagcaaatatcccaggggccgcatacagtggtcgagagacagtataccccaatggatccctgctgttccaaaacatcaccctggaggacgcaggatcctacaccctacgaaccataaatgccagttacgactctgaccaagcaactggccagctccacgtacaccgtgagtgattcccccatacctctgggtgctggcggtcagttctgcttcacacacatgagattgtcaggcctgggctgtgcctgcatccccctctgcattttgtcccgtgttgagatttgggcatttagtgcaggacacacacatggtaggtaaacttcaacagatcagaattcctttcctgcatccaggccctgcagacactgatggcgggggcgggggggcctcagcagggggaggtcagtctcagccaagcaccccatgccctccccatgaacctgaccctgagaaagaccctggagaactgggtcagggcctggcctgagggcgtcctgggaacctcacaaaagcccagcctcaggactcctgactccgtgtgaccccgggaagcctgtgtcagggctggggtgtggtctcctgggcagggcttactgggagcaaggatttaccagatgtctgcgggctgtggttcctgaagcttctcatcagtgagggctcagctcccagagtctcatctagacaaggacagagcctaccactttccctgggactcagcctggagagggcagggggacaggattactagggcattggccccctgaatgaggagcttaagagatgcccttgggcagtcagtggcccaggggtaggaacagaggggagaaaatgttcctggcagcttcttgtccaccggggatcatgcccaggggtgctctcccatggaggcaaataacagatgctgttgatgtgaacacctcctctgtgccaagcttcatgtcagatcctgtgaataatttaaagttcattcacagacaaagtggcaagcctcagaccattttccatttacatattgtatggaggggaaactgaggcacagagagatacagacaccggccacggtgggcagatcgcagctggcagagtcacatgagggctgtctgcagctgctgccacgtcctctccttcatccctggtgccttactaggtgtctgtggaccttagaacagccactggttcggatgttttcttcttaggtgtctacagctcggagggggagattctggtctggagagttatgagtaaatacagaattaatcagttttttcttaactaaatcacctgcctcaacaatcagtcagtgctggggaagttcaggcctcctcgctcaggtccacaccccgcatctctggacatgaaatggcttcgtgtgttttctgatgtgtgggtatcattccaacaggaggataaaggggaggactttgctttctctccccattcacaccctgcaccagccagggcccagtgtgagacacatactccgtagttctctcatgaaggagggagggaatgaatgaaggaatgatctataacctcttcagagacagagacctggatacaagatcctaggaggttctgggcccaacgtgagacacacactctgtagttctcttatgaaggagggagggattgaatgtaggaatgatctataacctcttcagagacagagatgtggatacaagatcctaggaggttctggccacacctgttttctgtccctctagagcctaagacccatgtctcattcatctggcccgtttctcctaaatctgcccctgggagctgagtctcatctgaccctggggctgcagggctgtgggaaggttttcaggggagggatcaggcttgcgggtagtcccacacgtttgccttacaccctggagctctacctggttctcactatgaatatcccataataatcccccctatcctttctggggagtagaaaaaaagtaaatatttaaaaatatgccagagcatctgttcttcttagcaagttcagatagttattagttagcaggaataaatcgttattttaccagagcctcacctgctgggggtttatgggagcctaactgactgaggggggtgggaaatatccaactccagccccctctagccatcatgtcccacctaaaggagagaaaaaactgagaggcacttgtgacattcacagcccagggcacagactctatccaggaccacagaacccctccctccccccactcaccaccgcatcactgaacgcctgctcacccaagttcctgttgcccagtacatcatgtcctggctttcaacaaaaactacaagacagactagaggcaaaaaaaaaaaaaaaaaaaatgcagttcgaaagacagaacaagcatcagaaccagatgcagatgtggcagggatgtggcagggatgttgaaattatcagaccaggaatttaaaacaactctggggccaggagcggtggctcatgcctgtaatcccagcatttgggaggccgaggcaggcagatcacctgaggtcaggagttcgataccagcctggccaacatggcaaaaccccgtctctactaaaaatacaaaaaattaggcaggcatggtggtgggtgcctgtaatcctagatactcggaaggctgaggcaggagaattgcttgaacctgtgaagcggaggttgcggtgagcctagattgtgccactgcactccagcctgggcaacagagcgagattccatctctaaaacaaacaaacaaaaaacaatactggctaatatgctaaaggctgcaatggaaagcatagacaatgtgcagaacagacggatgctgtgagcagagagatggacaggctaagaaagaataacaacagctactatatctatctatctatctatctatctatctatctatctatctatctatctatatatatgtatatatatgctagagatcaaactcactgtaacacctggatctcagagtggttgtgaggatgtttattaggagattaaagagattaaagcagagttatacacagggcgagagctcaactgatgctatcaactagtattcttatttttttgatgttgttattggcaataaaatcaggaacaatgcagtaaaaatttggttttatcatgtacgagttctgtgaccttccttgacttactgaggtactgtaagtctcagattctaactctgcagatggcggtgatgcccctctccctcaaggtgatgtgaggatgagatgagctgtaggtaggttggtgcccactgtgcctggcacatggaaggcccctgaaaatagtcaatgaacatcatccccgctcatcagcatggagttgacagtgagggctcgctctctgtgacaatcatggaatggaaaagaagaaacaagaggaagactgggcgcagtggctcatgcctgtaatcccagcactttgggaggccgaggcgggcagatcatctgaggtcaggagttcaagaccagcctggacaacatggcgaaatttcatctctactaaaaatataaaaattagcctggcatggtggcacaaacctgtaatcccagctacttgggaggctgaggcaagagaatcgcttgaacttgggagatggaggttgcagtgagccgagattgcgtcagtgcactccagtctgggtgacagagcaagactccatccaaaaaaaaaagaaaaagaaaaaagcaacagagggaagaggtgtgacatgagaggaagaagggatttaaaggtacaggagcagggcgaggtgcaagcacctgtgggagaatgtaggagttggtacatcccagtgtgtcaagtctgagacacagaaaatggtgcaaccgtggagagcaagggagtcagctatgaggacagcccaacagaccacactcaggctctggagcatttccttcctccctgactatgcccctgccctgcaatgccccttatggtttcccttggaacaaacttgggccttgtcccctttgccttcccctttctgcagaaaacaacgtcccaggccttcctgtgggggccgtcgctggcatcgtgactggggtcctggttggggtggctctggtggccgccctggtgtgttttctgcttctctccaggactggaaggtaccgcagcttttccccagcctcctcccacccctaggctgaccccagtcagggaggagggagaccccgccctgtattcagggccaggctttccgcatcctcccaaggaatccttccctctcattccatggctcctcccttgccagctgctgatcctaggctgcctcttcctttatgaatgtggcacagttaaggttgcacccctgagtgctgtcctagttccctaacacagcaaagccacagctgcctggagggaggaagggagggagggagggagggagataagacgggagtgctcagaacctggtaccttctgctgttcattgaatttacccacccagtgaggagggatttgcaggcttgagatccatggtgggggtcctgggcatggtcacgcagtggggagtggcaaagcctggacaggctgggtagggtcagcaccccatcgtgattgatgtccctgaggtgtgagatgggagaacctggacctcaggacctgctgtcctttatgtctcttgccaaggggtggagagagagaggacaaggccattgccccatttcagcatctccaggcctgaaaggagggtctggccatggcagggatactgagttctgggagaatatgatacatgctccttgcctccccatgcccccagctcccccagtgtcctgcacacacagccggccctgctttccctctggggccttgacccttcctctcaggcaaacgcaggtggtctgattccctccctgagtcctcagtccctttcctgggtccctgggtcaatgttctcctcacccggcatctgcctgggggggtccttcctctctggccaggacagacgtgactgcttaaggcctatcctcagctccccgtcctcggccgctcctaccacgaaactgatggagacaggaggccttcactccagtccttgaaaatggagtcccttccttgtcctttattctgcccctaaacctgtgatttctccctgcaccctcatgaataatcctgacctttcctagggccagcatccagcgtgacctcagggagcagccgcccccagcctccacccctggtgagtgtcccttcagcccaggtgtgggagcccctaggcctgccctacggtgtccactcctgccagtcaccccctgggggcctctgaccctttctttggggctgcaaggaggatgtcaggaaacatgacacaggggaccccgactgtcttgttcagactgatctgtgggctctgggtcgtgggtcacctcctcgacctcagctgctcaggtctcccctgggaagaggctccctctccctgattctctgggagctgaggacccctacactctcctgcaggaggggcccaggctctcctcccaccctgctgctcactcctgtctctgtccccaggccatggtccctctcacagatccaccttctcggtaagcctgttccctccccagcccttttctactggggtcccaacagtgcaggctcagggcagggggaccatcaaccccacagcacagcactgacccacctttccccagaacagtcaggtcaaagtgagtgcctccagccaggatccgggcctctctacagggccaggaccacccacgccatgtgctgacccctccccgggaccctctacacctgaggagaaccctggagtccagcaggtgcagaatggacactgggaccatcagtcagaggcccacattaacaagggtgcggggtgggcccagccaggacaggggtcagggtgttgtgtccacactgggaggctgagctcaggggcagagctggtcaatcctgaggggaaatgagtggaagtggaggcagggaagtaagtcctggccgatcagagacaggaaccttccaggctgggcttccgtgaccctccctccctgtcccctgacatctcctctctcccctgcccaggcccctctacccagccccagaacagccactcccatctatgaggtgagtgtgggccatggatgttctggtcccgcaggctccaggggacccaggatctgcccccaccagcacctggctgagctcagattcaggaaaatgcagtgaaaatgagaacaggtggtggtgagcagaggagggaggggcctgggaacagggaccccctgagcacagccaggttcagccccagagaagccctgggtgggcccagagcctgggagatgccagacactgttctgagaaggctacaggggttgaggcctcttctctgtttttacaggaattgctatactctgatgcaaacatttactgccagatcgaccacaaagcagatgtggtctcttaggttcctctgggagctgctcttgtgggttgatggagcgtccccaaagctcccagccctggggacggggaaggacatggagcctgagccagagaaccagctctgagtcctgaggagacacaggcctggggacagggagggatgggagtccctgctgaatatctggagaccctgacaggttgccctgggctctgggtgggccgggacaaaggcctctcatcaccacaggaagcgggggcttgcaaggaaagtgaatgggcctgtggcccacccggggtcaccaggaaaggatctgaataaagaggacccttcctctcattggctctttttctgctcacgggaacttagcagaaactcacctgaaactccgtgtccattctctcccgggtcacacagggaaaatatctccaccttgtctcaaccacagtctctcttccctgggaggcagaaataggggttgggagtcaggctggggtgggccctacacaggaaagggcaagattcacatgagccctgcccagccagccgagcgctcagctgtcctcacactaccccagggaccaaggccatgcacagccccagcctgggtccctctgtgaatgcatgtggggtctcaggagcacagaagatggggccatctgatgtccacaaaaggtgagcaatgcgggagcaaccatgggtggtataggttgcggctgtggcccctacgcagcctccagtgtcctgacccctgctgccctcttcacccaggccctggaggcccagtctatcactgtcctccacaaatgaacttacctgtccccaaatccaggatcctgtgtgcttatacctggccactaggttctcctctgtcccagtggctactgctcaggacatctttatccctggtggggcacagagaggggctgtcagagcaaccaagattaatacagacgcataattcagtccttgagcactacccaggactctggcccctcattgctcatcagttcccactttaccccctggcatggatctcactgagcaagccaactctttacacaggagcatccaggtcagaggtgcaggactcccccatctaaagctcatgcaggctcccatggcgatgggacaacctgtctgctcctctccctggcccacagccctatctcgcctgcagctcctccacacacctgggacagcagttctcagcccttccctgagggcccctggaagggtgatgatctcatataggttcacttgaaccaggtgccaccttcccacaagtgagctggtgcctgcactaaagcacagagccacagttcccaagagtgttctgccactgccacaggtcccaagagtgttctgccactgccacaggttgttcgtcctgagatgagaggtaagaaaacaacccgcaatgggttgttttatatcgggatttgcatcaggatttagctctaaatgacccctgatcccacctgcacacagcgtcagatgagacaaggtgaggcctctttagttttctgttgaggctgtgacaaattaccacaagcttagtgacatagaaacctgaaccaaagtgcccacatggctgtgttctttctagaggctccagggaagagtgcatttcctctccttttccacctcctagaggcctcctgcaaccttggctgtgtcctctttctccatcttcaaagccagcagcacagcatcttgaaactattctgtgccctgcttccatccccacatctccacctcctcccacctccctctctcacttaaaaggaaggagccttgtggttattttggacgcacctgggataaaccacaacaacctccccatctcatgatccttcctttaatctgtaaagtgtcctttaccacgtgacatgtccacagatctggggatgaggatgtacacatctttgagaggcccttgttctgtccatcactcctctcaaggccatcttctcatcatcgttcactacaaactacacatgggcacctggatgggttcatcatgactgtggcgtcagttcctgcattaacatccccagcaccctccagatcctgagagagggagacggagggctctccatgcccctagtacctctccaccttcttcttggtgacatgcttagttgctaagaataacagaaagcggaggtgactgaaagatcacaactcaccggcccttcaatagttcgtggacatcagcaccacggacagtgactcagtgaggctaatttccaggtggcagcagggagcatgcagataggagggaactgcaggaaaagctgcccattctattctatatgagaaagagtgtaagaaagaggaagctattacagggataatgctattcttctctaatccataaattgcgaaacctttgcatgtctggatatcatggtttttagcacatctgctgccactccctgcagggctgattgctgcatccaggatgtggtctcttggggggctcacagcctgctttggcctcatggtgagtctccctgcccctgacactcaggccactgtctctgcctacaacatggtgggaaccttccatgattaacgtctgattctctgtgcctgacctttgaagcacatccatcactcagcctggagcatccgctgagctcagcatcctgctcctccatccccagctgagcccttgaggagatgcttgagaggatctcctgggctcctctgtgagctcctccaggctgagccttgtgcttggtgtcagaggcctttgccatctgcttgttctttccataggcaaataatcctcctcagggacaagtggggcctgaagatctgtctgaatatctatctatctatctatctatctatctatctatctatctatctatcatctatctatatgtatgtatatatgagaatgctttattaggcaaaactgcatactatgaacatgctttaaaatgcaacaggatgagatgtgaagacataaagaacaagtgtgtagtgacacatggctatcagaacacactgaagaatccacaccgcggccgagagcagtggctcacgcctgtagtcccagcacttttggaggctgaggcaggcagatcacttgaggacaggtgttcgagaccagcctgaccaacatggtgaaaccccatctctactaaaaatacaaaaaatttagccgggcctggtggctcatgcctgtagtcctggctgttcgggaggctgaggcaggagaattgcctgaacctgggagacacaagttgcagtgagctgagatcgcaccactgcactccagcctgggagatagagtgaggctccatctaaaaacaaaacaaaacaaaaagaatccacactgcttccccgcttcactttacccagaaaaggaatgttctaggccacttcctcttcagcacacatccccagggaactaaaataggttcacagtcacccccatcttcctcattcccatcacctcttacccacagaggcatctctggtcctacagatccagccctgccttcaagaggcacaggtccaacccatccagtgtccctgctagtcacacacagcactcagggtacaatggagggcttctgtgctttggatgggaacaaaccccacctcacattcccacacctgagaagccaccagggtcctctctgtcctgtcctcacactcaatgtctgtcctgggtcacccttgtcatctctcctggaaataggcatggctcctgacaggtaggattgaggctttgtcttttcaggagtccctcccactctgagcacatgaaactgctcagctccatgcaaccctctctcaccaggggccttgttctctgggtccctgaatacctgggtccatgccatgtacattttaagaaaaatgacagtgactctcaccctgacatcctcacccaaggcacgtgtctgacaagaatcaccaggtgagatacctgtggctccacacacctgaggcttcactgcgcaggggtgtcctcatccctctcctcccacccctagggacagtaagcaccacaggctgccttggaccaccagctccccctcccagacacagcctcagatctatactgacatgctacatggagaggctctgatgaacagcaggtattaggaaatcccaccgaaccaggtgccacttgcggccccactcctcctcatatctgtgactgggacagacacacataacacacctctgttcaccgcccagcccccaaggtcaatcacagtctgcttctcccctagatccactgctccccatgtcttccgtcctcagctgcatcctgggtggcctccttgctgttcttgtaccccagaggcaggttccaacctttgtgatgttgcctgcaatgcccaaactttcccttccccttccccttcccttttcccctcccccttcccctccccttcccctccccacccctatcccttcgtcttcccttgtcttcccttcccttccctataaagccaaacatacccatccacctaccttgtggtcaaagtcatcagcctcctgctccactcagtgttctctgaccctgcatatggaggtggtggcccctcctagaacacccaccactcactgtcagccttgcgtggtaatcacagattttgcaggggttacctgtgttcaggtgtgtcacctgtggaaccagaactcttggaaggactggcagagggagctgcttaggatatctcagggctcctggcatctggtctaccacagggctattaacaacagcacttagggacaaggtggaggatggacggttaagagggtaaatatggatgatgtgtgggcaaagaataggacacaggaacacatgcagtactcaaataattatgccaagaaaggtgaggacatggagatggacattcccatatacttctgatgggactgcagtttagtccctacagcaacattgacctcatcatgtttaacgcgcacacgctctgaccactatcctacttctgaaggcctccctgtgctgtgagctctgagaaggccaagcttgcctgttctgtctctgctaaagccagagaccagccaatagcccagcacagggtacttcataaatacatgttgaaggaatgagctccaggaacagtactccacatggtagagatgtgtgtatgaggatgttcactgcagaaggtcatgtcaatgtgacaagtgacgagcagcctcaaatccagcaacaggggtgtgggtaaaagatcatagtgtagccatgcaatggaaccaatgaaaaaaccacaattagagcaaatccacatgtattaataaaggaggtgccctccatacatgctgcacctaacagaatgttgccaaataagaatgaaaaatgatgatatttgggctgtaaaaactagaagtcagctaaataagaatgcatcgaaagtatttgtgaatgcttacaattttataatgccttggcatccgttttggatggaagttggactttctcataccagaagcagggctcagtcacctttgaaatagtttccagttctccacctccttccagttcctcagtgtgattgatcagatatctgatttatacaactgcctcctggtgacctcctccctatgggacttccggatacagcccgtatgactgccccactgaccccacaccctgcctgctgcagtgaccacctctaattacctggatctcatgtctgcttgcattaaatccaccaattaaaactccctgaggacaatctgtttgaataatattctgtaccctaataaaggccttgacccatgggttccccctctgtcctccccatactgcccctgacctctgtgtgtgtgtgtgggtgtgggtgtatgtgtgtgtgtgtgtgtgtgtcctccagacagggcctgtatcccccaggacctgtaagtaataaatctttattttcatcttatgtctctcgcaatcattggcaagagctctgcatcttaaagatcgcaaatttaagaaattggtgtagtcggcacaatagagtacctcttctgtttagcacaagatatctcggagctgctgaggcttttaacatcctcgccggtgtggctgcctcactggtgaggccgttctgttcagtgcaattcagttgctccactgtgtgctgctgtgttgctgctgtagagtgctgccatgttgttctccccaaattgttaccgagtaggaacctgtaatgtgctcccaaggtggtctaccccatgagaagggggattctccatctagggcaagggctaggtgtgtttctggaatcctaatagggaaggcatccacagagggtgaactccactcctccttagagtgaggagtgacatttcccatttattttccccatggaggtgccatgtattgactttttctttcactgtcccaaggttgagccaaggtgagctatggagaccagggcaagataccatttctgttagcaaagcaaatgggtgacaacgtgtggagaagctgtggttctcctgatggatatagcagagtgccatttagtaaaatcttgtcaggaggctgcccctggttagaccggcagtgtctgtagtcactaaggtggatgcgaattttaggccctgggccatggataatccctgcagacacagccgtggcttcatgtgatggggcaatcccgggctagtggctcccttgtttctgcatttcttgctgtggttgcacaatcaacacctcaggggttgattgggtcaccttggaaagagaaacagctgcctaggaggctggtgcacatggaggccaccctcaattttattctgctaacaagttgtaagattaaaacaacagggggctttgggtaccatcaggaacttgtcaagtaaacatccaaagacagaaagaagaaaaagaaaaagacattaaccgtctagaaatacaagccattttaaagattttgcttaaaagatgcgcttgggctgggagcggtggctcacacctgtaatcccagcactttgggaggccaaggtgggtggatcgactgaggtcaggagttcaagaccagcctgaccaacatggtgaaacctcgcctctactaaaaatacaaaaaattagcagggcatggtggcaggtgcctgtaatcccagctacttgggtggagaatcgcttgaacccgggaggcagagacggcagtgagccaagatcgcaccactgtactccagtctgggcgacagagtgagacttcatctcaaaaaaaaaaaaaaaaaaaaaaaaaagacgggcttgtttcgtcgttgtggagtcatcccagagagaggctactccctagagtcactgaccacctttcctcctccatcttttcctcttatcattctagagacagaaaacaagaatctcagctttaggtggctaacctcaccccccaagaaaagaaactaccactttgattgactacaaatccaagaaaaataaaagagaaactttaaaaagtactgagcaaaccacaggtctagcaaacataatgctagccctaggttacttattcatttacaacaaacccctagatataggaggaaaaaataaaaggtaattaaatatatacacatacaatattttaatataaatatataataaatagttaaattatgtatgtataatatgtaactaaatcaaagtaaaatttcatactttgattctattggaaattcaaaattcatttattaacttatatattaaggaatttatgtaaaaaaagatttttaaaagggcaccaatttgcttttgtgtctctacaacataggatctaatttaactttacatttgctaaatacactaattgacaaatattcatggatttaatcaatactggggctcaaattgtagccacacgtgggaatcccataaatttaaacactctgtccctattatcttgagaagaaaactaaatataaaattgaaaaaaacaggtatgtctcaatttacctgtaactttgcctaaatttcccggagtcatatacccattgctgtaaaacattctctattggacataggtgctctgagacaataaataaaatagaagtgtttttggtacttagacattggcttgacaaaatgggatcccatgaaacctcagttaagatagtgaatacggcccaatgtgagttgaaatggggcctttaaggattaaaacttattacatgaaacctagtaagtaatggggtgattatccatactgcttctccatttcatagcccaattttgacagttgtcaaatctggaaaaaacaaacaaacaaacaaaaaaacccctgggaatctgttgcctcacagagacacaaagtagacatcaaaattgtatatctcagttccagttccaaaatggtggcatagaagcaagctggctttactccttcacacagaaaaccaaaaacaaatatacagcaccaaaattattaccagatatattccagaactcaaatatgaaaatgaaacagttttcagagccacagagaagtgaaaaaaactcccgacagatgacaaaagaatcagatttccccatctgtaatgtccctccctgccccattctgcctggtaccaggtgtgtggaaaattttaccccaactcatggtttctacactgggaaatgtaagatcaatgcgggcaaccagtttctgcacaatcctgggttccctgtccctgccttaacccacaagaagcattgtgagtgcccgaagggagaaatttccctgaggacagtcaaagagtggggaggcaggactaccatctccttccctggaaactctgctgtgtaactcagccaagggagacatgaaatcagactggtgtttcagcagctccatgttgtagtaggtttgtttcacaggtatcctgggcatggacatctagccagctttcccacactgccaggatatcccctttgggacctccctcagttaggaagggcacactctgatcatttactagggccaaggtaaaccctaaaggtaacttagagatgaaaaggaggtagtgacctagcagtaaagaactctaagaaaatctatccaataaaaatcaaaacaagccagacaaagactaaaataaataatgaatccttcaatgtaaagacctggacttacatccacaagaaacagtaagcaggtaaccatgatctccccacatggacaaagtgaggaacaagtgactgatcctgatgagatggtgatgtgtgagctctctaatcaagaattcaaaactgcagttttaaggaaactcaatgatcttcaagaaaacatggaaaagcagttcagaaatttatcagagaaatttaacgaagggattgaaataatttaaagaaaacaaacaggaatcttggaattgagaaatatatttgctgaacaggaaaatttattagagtctctcaacagcagaatggatcagaggaaagaatcaacccaaataagactcccccaaggcataaaataatcgaattctcaaaagtcaagggcaaagagaagattttaaaacagaaagagaaaagaagcaaatggcataaagaagctccaattctgtggcaacagattttcagtggaaatcatacagaccaggagggagtgacatgacattctcaaaatgctgaaaaaatattgacatttgagaatactttatccagtgaagttatccttcaatataaaggagagagaaagtttcctagacaaacaaaagctgagataattcacaccatcagactagtcttcctgtaaatactaaagggtaaatactaaatacttcaatgtgaaagtaaaaaaaaaaacactaacatgcaaaacaaccacaacaacaataacaacatttgaaggtataaaatccactggtgaaattaagtacgtagacaaacccagaatactcaaatagtaattgtggaaagtaatccaatcataactctagcatgagtctcaaaatataaatctatcaaaaacaataatacattttaggaggccaaggttggcagattccttgaggtcaagagttcaagaccagcctggtcaaaatggtgaaaccccatctctaccaaaaaatacaaaaatttgcagggtatggtagcacatgcctgtcgtttcagctatttgggaggctgaggcaggagaattgcttgaacccaggaggtggaggttgcagtgagctgagattgcactactgcactccagcctgggtgacagagggagactctgtcttaaaaaaaaatagctacctgtttggagaaaggtaatataaaatatgtaaatagagacaaagtcaaaatttgcaaaggatgaaattaaagagtagagtttttttggggggttttctgtttctattattttatttgtgatctaagataagttgttaccttttcttctcttgaagatactttgttatatctatgtttttggaagtcttatggtaactgcaacgcaaaaaatctatgatagatccactgaaaataaaaaacaatgacttaaaacatactaccagagacaatcaaccacaaggaagacagtaaaaaatgaagaaaggaagaggggagttacaaaacaaccagaaaacaggcaacaaagtggcagtagtaagttcttacttaaaaatattgaacactgaatataaatggactctattctccaattaaaaggcatagagtggctgaatgctgcctatatgctgcctacaagaaaccacttcatgtaaaaagatacaaatagactgaaagtgaagggggtggaaaaagatatttcatgcaagtggaaaccaaaagagagcaggagtagctatactgatatgagataaactacaaatcaaagactataaaaagagacaaagaaagtcactatgtaatgataaagcgctcagttcagcaagaggagatgccaattataaatatctatgcatccaacacttgagctcccaagtctcccaagtatttaaagcaaacaatagtggatctaaaaggagagatagactgaatacaatattaattaggggactttaacaccctgctctcagcaatggccagatctttcagacagaaaatcaacaaggaaacttcaaagttaaactacacactagatcaaataggcctaactggcatttacgggacatttcactaactatctaactgttacagaattcacattattttcatcagcacatagaacattcttcagaacagaccacatcttaagtcccaaaaccagtcagaataaattcaaaaaagtttatatcacatcaagcatttgttctgaccacaatggaataaaactacaataaatgaataactttctggacacatacaacctaccaagatggaagcatgaaaaggcagaaaaacccaacaaaccaacatgaaactgtaacaaaaggaaaacccaggaccgaatgacttcactgctgaattctaccaaacatttaataagaactaaaaccaattctactcaaaatgctttaaaaaattgaagaggatggaacactttcaaactcattctacaaggtcagcattatcctgataccaaaaccagacaaggacaggacaaaaacaaacaaacaaacaaacaaacaaacaaacaaaaaaacactacaggattgcttgaggccaggagtttgagatcagcctgggcaacatagtcagaaccaatctcttaaaaaaaaaaaaaaagaaaaaaattagccaggcatggtggcatgtgcctttagtcctagctactcgggaggctgaggtgagaggaccaattgagcccaggaggttgaggccgcagtgagccatgtttgtgtcactgtactccagcctggggaacagagcaagatgctctctcaaaaacaaaaagcaagctgggtgtggtggctcctgcctgtaatcacagcactttggaaggctgaggtgggagaactgcttaagcccaggagttcaagaccagtctggacaacatagggggactccatctctcaaaaacaaccaaccaaaacaaagccaaaaaagaacataggccaacatcactaacaaacatagatgtaaaagtcctcaataaaatattaacaaaccatgtttagaaacacatcaaaagagatcattcactatgattaagtgagattcatcccagggatgccagtatggctcaacatatgcaaatcaataaatgtgatccatcacattaaagagaaccaagaacaaaaaccatataatcactccagcaagtgcagaaaaggcatttaataaaagaatgggttgagggagtggagcccatagtcagagcagcagtggtctgggattttggaagtagaaagaagggcagcaccactggccaggaccaccagggaacacccccataggccctgggtgttgtgctccagggagggttccctctggagttattaatcttggtgtccactttgcccagctgcccctcacagggtcagggaggatgaagggaaagcttccttctaatgaaagttcagggactcacagttcctagagcctgtagggagaggaagatcttcgaggaagagcacctgggcattggggcgtttgagaggaagatctatgccaggtccaagtggacaacctgtggactctctctccagggacatacgggtatctgggaatctcctgtagcttaaagaggtaaagacctctccctttagcctgaggactggaggatgctggttcaggtgaatgagtcctgcaggggctggtacaggcctggagggtggtggtgtccagggccttgggttcacccttagcatgattcaggccgggcggtgtttcacatgagcaagagggcctgggttcattgcttcaggacaatggtgaaatctcatggtggaagaaatcttgtccttgccagtgcccagctttcatttggtcttggcccagagtgtcctccctagagaagactcttgtcccttcttcacactgcccttcagggatatgccagccttatgggataagatggggtggagactgtagatgtgggtgggaatctctccacagagtgctccttctctcagcggttgcaccttgtctcagggcttcagcttgaaatctgggatctccaagcccttccctccccagtcctggccaggaccacatgggcagatgcattgtgtgaagtgcatttcatttggggtgtcctctctgcatggcaccctcccgttgattctctttgcgcatgtcagagtgcaggcaccatccacacctcctgctggaggagggacggagctgttgactcctgagagctgatcatgtgttcccaccctcacacacaatcatggtccatcctctgagggacatgtgttgccaccactgtggagatggtgcaactgacagtaacaaacagtaaaatctggtactgaatgggaccttaagccaacaatgacaatgtcattccaaggtgtttcatttttattgattcaatgcaagtcacctgatttcattgactattcacaatagctcgataaagtaaatgcatcatcaccaccactttaaagaggaaaaaggtgcttgggcagtttgtgactactgtggtggctgctgcattgctctctggtaaagccaagtaggtggtgggtgcggcctctgggctgggatgatccaccctcctggtggtggcaggggagccaagctggagccatggcctgtgcagtggtagcagctgaactgaccgctgctgcaggatttgcaagctgttacattttgcgaagccatgaagcacataaaacctcaagtagaacaagtgtttcaaagtctaccaaaatctgccttcagagattattactacagaggtggatatgaacccaaaatgacaaaacgggaagcagcattaatactagataatgaatgaacactagtaatagtagggtaagccctactgccaataaagaaaaaaataagagatgctcattaacatgttatgctcttaaatcacgcagacaaaagagggtctccttatatagtagccacaatcaatgaagctaaagatttactgcaagatcaagctaaaaacagtaggtgtataatgaatttttaacttcatattagtttatgtatatgaatatcaagtttttataataaaatgcctccaaacaaagaatatttgatttagggtttaataacttctaagaggggactcagatgtttcctgtttcacagtcagtctgagagggtcatttttcctggagctgacctgggtggaggcctcacactgatactccccagcatcctctctcctgatggggtttatgctgagcatacagtggccctgggacagctccattctctccatgagtcacagacgctggtcatggaagatccactggataaggttccagagtcatctgtggggcaggtcaggatcacaacatccttttcttctgtgactctggtgttgctgactcagatggggtcggagccactgaccctgtggacaatcagtggaggtgctcaactgaaagtgggctgagggcacgtcttctcctccatccctgggtccttaaggtaactgtggaccccagaccaactgacacaggagctagaaagaaattatttaggaagttagtgagggtaagagcgtccttggcaaggtttcccctttaacaaaaagcagcccaagataattccttttctaacaaagagcagcctgaaaaattgagctacagatgtagatgagcaagatggaagcttgcacaggtgaattccagtaggtgtgccaatagaaaagggctgcctggaagccaggtatgttcaacatggagactccatcctcccttttctccattaccacatgtacagtaaaaaaccaggcaacatggcaccggccaggtagacaatccatctgcatgacaaaagatcagagtggggcagccagcaaatggcacagctggtctaaacaatctttcaccccctgtataaatcagacactgcctcctgaagctcatctataaaaccttctgcatttcactatggaagtggcaacccattttccccaggacccctctctctgtgcagagagctcttctctttctttcccctatgaaacttccactcttaacttcactctgggtgcctgcatcctagttttccatggccatgggacaatgaacctcgagtattaccccagatgaatgatgctgtttcacaatcactggttcagctcccttcttcttagggtttcacagctcggtggggagaataccacgcctcagtggtctggggagtgaggaacaaatgaagaattaatcagattttacttagaacgctatcacctgcctcaaccatcagatccatgttgggaatgtccaggcctcctctcttagatctatacccacttcactggacctgaaatcctgtgtttcccgatgtgttggtgtcactcctatgagaggataaaggagagaactttgctttctctccccactcacaccctgcacaagacagggcccaatatgagacacacactcgctcagtagttctctcatgaaggagggagggagtgacctcgagtgattctgccatctgtagtctgtgtaccctggccagtggctgtatcttcatatgcctcagtttcccctcagtaaaataggacacacaatgagaactaaaaataaaattctaattccccagtgaactgaaaggatggcctcttggccaagcggatcccagagttcctgatcatgacaggatgggaggttacacctcattacagcccctccctttggaagtttagaggtgacaactgactagcattaacgctaaaatcgagatcatgagactgacagaacagactctctgtggccataagataccaaattataaactcaacctaaggtcatgcaggcaagggctaagccacactttcctacatttaaagaataagctatgttctaacacagaattttctttctctctagcggctaaagtaacactagccttcgagataagcaatattgaaatgatcgcggctcatccaccaacactggctaactgacccctgttccaacagccacaactacacttcaattggacaggagactgatttcagtaactttctcctaataagagaccactgagcatggcctggttctgctggtatacagacacggtgcactgagtaccataatgcttgtttcatcttttgatgtataagacctaatttaatacatttaaatctgaattctccaccccaaagtgaacatggggtgcatgtagcatgcatgtttgttgatcacgcatgtgcgtgtacttcctttgtgagtatccatagctccacctataacctgttgaatatgtatacctggccaactcattcagcataaatctatcttccacattcccctcccttgaagtgcctgctattggtctctgctggaggctgcatcttctaccctggggaatggccagcctgcaggctgtaaccctgtgtaagaaataacctggttgggtgcagtggctcacacctgtaatcccagtggtttgggaggttgaagtggtagaatagtttgagctcaggagccagagactagcctgggcagcatagcaagatcctgtctcttaaaaaaattttagggaggagagtgaggatcagaaaaaatacctattggctattatgcttagtacttggatcatgaaataatctgtataccaaacccctgattacatatataacaaacctgcatgcgtatctttgaacctaagataaaagtttgttttaaaaactatctgggtgcagtggtgcatgcctatagttccagctactcgagactgaggtgtgaggagtgcttgagctcgggggattgaggctgcagtgaattatggtcccacctgtgagtagccacttcactcaaacctgggagacagagcaagaaccggtctctaaaaaaaaataaaaatagaaaaataaaatgaaaaatatatgaaataaagtctcctttccaaacgtacagatctccgatttttctgccaacaatgataaatggtcagtggcttgccatgttgtctgtgaattacttttaaaatattcacgatcacctgacctaaaggttggtaccaaggaaccgcctgaatacaccgtctctgattatttgcctccaacagagtgttccctgggcctgatctctggtggacaatgagctgctgggaacatcctctcttctctattcctcccctggggatgctgaccttcccttggagtctcctaagttccccagggcagtcggctaatgtcctagggagcttacctgtcttctccataccaagtctcatgtgaaggacgaggctttgcccttgcccagatgaggctctgggggctgagccctggctggctaccagctgcaagagccatggcccttggacagctggtaaatccttgttcccagtcagccctgcccaagatgcctcaacccagccccggcacaggcttcccagggtcacatggagtcaggatcctgggacaggggactggacaggggtttccagggctgagtttctgaacaggggcttcccaggggtcccctcactccaggatctgacatggtcctacaaggaacgtccatggggaggggacccaggagggggaactgacactgacctccccttactgagcctccccccaaccccatcagactgtccttcctctgtagcaagtgcctgcagggtctggatgcaggaaagaaattctgatctgtggaagtttgtctcccctgtgtgtgtcttgcactaaatgtccaaacccccaaatgggatgtaatgtagagggggacacaggcacagcccaggcctgaaaatcctgtgtgtgtgaagcagaactgacccccaacacccagagctcatgagacatcactgtgtacgtgaaactggccagttacttcttcattcacaagatctgtttttatgacttgtagggtgtaggatcctgtgtcattgttggtgacattctgtatcagcagacatgtattggggtatattgtctctcagcctctgtggcaggtcctggggtaattacttgagttcctagtacatatcctgtaattcccctttgtaccagttgtagccaagcctaaggcagattgtgggtgagtggaagaatctccttgccttctgcagcttcaacagtgacttgggcagtggtaggcaagttccagaaagttaaaagtgaggctaggagtggggagagagcatcagttaatactgggccctatgcattgaggtggaaagatggggccctaggtcctggacaggtctcttcatccctcagccttggagtgtgtgtgtgtgtgtgtgtgtgtgtgtgtgtgtgtgtgtgcgcgcgcgcgcgtgcgtgcgtgtcctactgggccaaggtcagcagcatgacctcccttccttcagtgcctctgaccttggcatttccctgtttggagtccttttccccaggggtctgcctggctccctccctactgccttcaggtcctgctcacattagggcatccttgggagaccccttccctgacacctctagagaccctgggtcttccctttctgacctttcgctgctgtgttccctccagggctcttgtcaatacttgacctcacattctagatacccttgcatgtctgtcttcctccctatgagagcatgagctctgtgagaacagggacttgtgtgatcttggttgcaccccagtgcctgggacaggctgcggactcctgtggatgagctcatgagtgttcccagggcccttcacaacgtgggatttattttccaatggctgaggttgttggctaagagctctgttggagttcaatcaggctggtgggaaaaatattagagatagttatagagatagacacaaatcttcttggaagaccaaaaagtttgcataactttggtaatagatctgactgaaggtggtccctttacctttagttaaacaaattaaagtagtaacaaaggaaggcagagtagtttgtctagccagcttgtttactcatgtgatcttaagactaaccattgatgtgccacaggtgcttaattgctttctacttgggaagtccacaatgtcaattaccctctaacggtgttgactcaagcctttgttaattaatcttactgaataaatatgagtctcactagctgatcaaggccatggtcacaactgtttataggactcagcagggagtctgtaagcggccctgacagactcagctggactggcaaagcaaaatatgtgtgtgtcagtgtacactattcacccgtcccccacagctggtgcccctatatgaggagtgctgccacagagctctgtttagtgtcccttgttttttttcttgagtattaccccaacttaaattgtgattattgtcatctgttttcaacattaactgctcagtgatgattcacttggaaaacattaacaatcgagattgtttcttcactaacaacctcagattatttagattttcctgttgtaatcccttcttcctgtttagtgtccaacagaagccctctgtccctctcaggtccccgttctctccaagaaaccccagccagtctctgtgctccctcctcccatccactcccagggagccctcccctcacctgtgagcagaagcgcctgccagggatgtgcactctgtgaggaggggctgagggaggccccatgggctctgctgtctgctttgtcctcctctgtggagaggagcttgggcttcagaaaataaggaggccagaaagtaaggaacaggctgagaaataatggggatgtgtcgaaaggtcacagatgccaacatctttgtcctatgcaatattatccataaaattacaggtttgagatatgcttaaattttcttctaacatgcattaaaataaacatataacttttaatagttatattaaattgtatttaatataaattaaatgctcttgtcagagctactgtgactgtcagctctgctgtccttcctctctctgtgctaagcctcctcccagggcagaagcacttcccagggccaggggtgggggcggggaaaggtaagtggcaatgaggatctgcacaggtagcctttccgcctcctcccctctcagtcctgcctccttgtcttcttttcctctttttctccaatctacatttcagttccttagaccacgctgtgagaagcaaggcttattgggacccccatcccttaacaggatgacctgtgctccccataagtgacctctgctgtgtctagggattggctctgtcagcacctcacagagagtccctggggcccccaaactcagtgttattttctctatgacacagaaacccctctgggtatgcaaggttttcctcatgttttctaatgtctgggaaggttggatttactcccagcagggaggtcacagagatgtccagggagtggggtcctagaaatggacaaatctagagctaaagcccaggtctacgattttcagttgtttttttctgcagtgctatgtgaccctaatttcctaggagtaactaaaatgcaaacctcagacatttgtagacattttatgatttttctctacagcttgtaccactgttattattatttgctttatgctttttcctaaataaatttactttacaaaacatccttgtcctagtagggtgcaggggctcacgtctgtgatctcagctgcttgagaggttgaggtgggtggattgcttgaggacgggaatttgagacaaaacatctttgtcctatgcaatattatccataaaattacaggtttgagatatgcttaaattttcttctaacatgtattaaaataaacatataacttttaatcatcatattaaattgtatttaatataaatttatatacaatacatttttatataataaattatatatataaatgtatatataatagtttttcttttttgagatggagtctggctctgtctcccaggctggagtgcagtggcacgatctcagctcactgcagcctccgccttctgggttcaaacgattctcctacctcagcctcccgagtagctgggattacaggcgcctgccgccacgcccagctaatttttgtacttttttagtagagatggggtttcgccatgttggccaggctggtctcaaacacctgacttcaggtgatatgccgcctcggcctcccaaagtgctgggattacaggcatgagccaccatgcctggcctatatattttatataattatataaagttttctataataaattttatataataatatataaaatggatatttatttaagataaagttattagttttatatatttacatatatttaggaataaatgtgttactgtgggagcccagtgcccaggcaggtagtcagtacatgatggttgtcattagggttaatactttggaattctggattttttcccaagagagtgtctacgctggaatattgggcttgtggctttctgctgatgtgcatgtgtgaagaagctacttccacttattaggacttgtgtatctgtctcgcagtttcactacctattttctcgtgatgttggtcaagtcgcctaacttttctgtgcctcatttacctaatttgtagaatatgggtaacagtacacaagtgtgagtgtgtatttcccaggactgaccactagagggcgtgaaggcaccggcacttactattacagcaatgggtgtagtagtgctcatggtcgtaaacatcattctcccatgaaaggaaccagggcttcctgggagaaataactgattccagggctggggccggaaagcacaagcggagcctggagcatctcgtgaggccagaaagtaaggagccggctgaaaaataatggagatctgtcgaaaggtcacagatgccaaccagaaggagctttgaatgaccaattttgagacaaaatgagcactataagaaataatgatagtaataaattccaacccataaatacccatgagttcctactaatataaataaataattgaatacataaatatataaggatgaagaaacagctttttcttacagcagaattccaattaatgaatgtagaaggaatgatcaaatagaaaatcactatttggctaacagcacagtcaattgtttgtaggcaagaattatcaatggactttaaatatgaatgggtaaaagtatgatgatgctacaactagtgagtaccaagggggaaaaaaaagtacgttgagaagaaacaggctacttccatattcccaaagtatcacttcaggagctacttattgattataatgggacaaatagtaacttacagtagagaaacctggcaacagagtctctccgaggtacaaaggctctcttcaggaaggaggtaaggggaaggaagaagaaaacactgtcctgcctcaattatttgctttccccattctcaagtgtacttcatagacattcaaagatatgtgttgatagtgtccacgatccacatggctctattatagtcatttattcacacatacattcagtgaggctttgagtgcctaatgtgtgcctgatatttgctagatggtggatgctgagaagatcaggtgtgctgctgtctctagggtgactgaatccacctgccccactttacagatgtggaaattaaagtgaaaaggatttataggattagttcactgtcacaaggtcactagccttaaagttacaggagtaaagcaagtttcctgacttgctagattttctgctgcaggtgctgacaatggtgagctccaataggagagaggacactcagagtgaagtgggagccctgaacaccctggattagccaagaggacatgccgggtccagctgtgaccgcacaaaggaccattggggatatttgtattctctttttcacttagagcttgaaatgaggaaaactaagtgcagaaaaccaagagtggaagatttttcacaaagcactggtaacatgcatcagaaaaccctgtgctgatgtctgtcacggtgtttctcactgaacggtaatagtctggctttgagtgtgttccctctacagcctggagttctgcgaggcagggaccaggtgtgattcatctttgtctctccagtgacagtacacagcaggctctgataaatatttcttacaaaataaaatggaataaaaagtagacatctgcacaggtgtgggatgactgagcagcagcagaagcaggaaaagtcagcgtccccagatcagctgatgtggtgttcggattctagataggggtgaggtgccaggatggggatgggggtcctgtggctctgctgccctgggggacacccctaggtttcacagtgcctgctgtggttgctgcactttgcttccccatgggaaagtgatcagagggtgtggggcttcaggtgaccccatgtgggaaatggccaagggaaggtggggtgggcggcacatggttttttttaaccaatatttgaaggtaggttgtatgaaaaggtgttaggcttatttcagcttatggggagtaggacagggattggtgagtgtgtatcaggtatattttggctcaggatggaaaagaactgtcacagtaacataaggtcttttgggaaattacatgtttactggcagagttcaggccagggctgggtgtctgaaaatacctgtcagggtcacttttatggttacaagggcagagcttggcttggaaccaggtttcttactaataccacatattaagtattataaaaactgtcctttgcaataggacattgctctatgatgcaggttgaggtccctctgtttaagtaattgtgggtggctgtgattctctcatctagtctgcgacttggacttcacctccatctgcagtccctctcctttgctgttgacactggtcagagttaagcgcatttactgacgatggtcacagggtggcagcactgcctctctggtattttctaaaacctcttcctggaactgagccagtctaagaggatgtcatgactaagaaaagggcactaatgaggtgaacagataattttttttttcttgtttctcctgtgaagtaacagagtggaggtgagcatggaataattgccttttagaaatggaagacaatggagagaagtgtttcgcaaaccttaatgtgttcacagatcccacacagatctttttattcaatacagattctgatttttctggtgaggcctgagattgtgcatgtctaaggagcttttggatgatgccattgctgctggttggcggaccacactttgagtagcaaggctcgaagatcatttagaggttaattctcactgcatctaatttatggatgaaaacaaaccaaggtccagagagagcatatacagcttgcctaacaaagccattccctaagtgcctgacttcttgcatttaaacccagggcttcagcctttgtccagttctcactccacacatcacacggtttgttcactgttgtgaacgacagttgtggcagcatctctttagtttaggaatccagagccccaatttcactaccctctttggtcttggctcatgctgtgacttcgaatagttttgcccttacttaaaatcttcagtggctcttttgtaatcacaagatcaagttcgaatatctctgtctagtgttcatggctttataacatatggtatctctttagtaaccttacctaacttccctgttttaaaattgtctcttgctgccatagccctccttgctccttcctgctccctaacaaactgtgttcacttctctctcagtggtagtgatgatggcatggcctctgatgttagactcatgtaacttctaatcccagatccaccaccaacattggcaagttgattcatctttctgaggataagcatcctcctctgaaataaacttagatggcggttgagaggggtaaataaaataacacacaaacccactctcatccctgagaccctcttcaaaactagcatataaaaatagctatttgaagaggttcagtgaaattcaaggtaacacagagaaggaattcagaatcctatcagataaatttaatagactgaaataatttttaaaaatcaggcagaaattctgtagctgaaaaattcaattgacaaaccgaagaatgcactaaatctttcaacagcagaattgatcaagcagaagaaagaatttgtgagcttgaagagataatatatgaaaactcagagtcagagagacaaaagaaaaaagaattaaaagaataatgcatgcctacaaggtttgattattaagctactcaaagagatacaagagaagggtgaaaaccaacataaagaaatgtaaaaaacaatcagaatataaatgaaaaattttctaaaatgctagctagtttttttttgagacaggctcttactctcatcacccatgctggagtgaagtggcacagtcatggctcactgcaggctcaacttcctgggctcagatgattctcccacattagccttccaagtagctaggactaaaggcgtgtgccaccaggccaggctaattttttgtatttttagtagagatggggttttgccatcttacccagggctggtcttgaactcctgggctcaagtgatccaggagattcactgccaaaaaggatataaccaagtcatatagtcataggttatctaaagtcaatgtgaaggcaagaattctaagagcagtgagacaaaagcatcaattaacttataaaggaaaacctatcagtctaacaccagatttctcatcagaaaccttacaaaccagaaggtattggggtcctaatcttttggcttcttaaacagaatagctctcagccaagaatcttgtgtagagtgaaattatatttcaaaatgaaagagagaaatacagtctttttcaggcaagcaaatgcttcaggatttgtcacggctagaccatcctacatggaatgttaaagggacttctaaatcacaaaacaaaagatttaaatagaacagaatagaacctcttgaaaccaaaaaattcaaatggcctataaaacaataacacaataagaaaacaaagtagataacgatcaacatgatgactggaacaaatattaacattgaatgtaaatgacctaacactccacttaaaagacacagattggcaagataaataaaaaatcacaaaccaaatatcagctgtcttcaagagactcacttaacatgtaaggattcttatagactcaaggtaaagagatgataaaagatattccatgcaaatggaaaccataagtgagaaggaatagctatccttatatcatataaaacagactttaagcaacaacagtaagaaaaagacaaataaggcaactatataatgataaaaggatcaatcaaacaagaagatattacaatcctaaatatatatgcacctaactttggagctcccacattcataaaacggttatgatgagacctaagaaaaaagatcaacacaaaacagtgagggtgtcctgggttttctttttattggacagcagtgtactagcctatcactttcccagtcaggggatttttggtctccccattcccctaccatgggttcatgccaaagtccatattttttattagtgtttggaattggattttttttttttgaggtggagtctcgctctgttgcctaggctggagtgtagtggcacgatctcggctcactaacctctgcctcctgggttcaagcaattcttctgcctcagcctcctgagtacctgggactacaggtgcatgccaccacacccagctaatttttgtatttttagtagaaacgagatttcaccatattgtccaggcttgtatagaactcctgacctcatgtgacagggaaacaggcactcagtgaacttcatgcgattgaggagttaatgataatgagagaagggctgtgaggggacagcactggggacaccagagcctgtgacgggctgagttgctgtgccttgggagatgcccttttgactgagccctgggaaggagggggtgtgggggcaggagctgcctgcagagggagtggcctcaggtgggcggccacctggctgcagggaagaggtgacagagttcgtgtgcagagcttggagggtgaggaggaggtgggttgaggtgaccttggtgagggtgaaccatggggggctgtgggccctgctgagggaggccagccagccctggacctacagggtggtttggtcttttttgtcccattcccagcatccactgagtggtgaaactctgcaggccagggaccatcccactggccagaaggagcgcacagtaggtgcccactcagtgcatgttgggctggacagaacctcactctgccccctgcccccagctttgggagctgcagcaaggtccctccccctagggatctccatgcctctgtctctgaggggtgagatggggagacttcaaagggccatctcagagtgtgggggatagagacgcagaagtgtgggggatagagggaggcctgggctctagacccaaaggaccttacacacctcctgagtcttttcaaatggtttcttctgttactttaaaaatgatgtaagtcatcatatttattgtaaatcccaggaatctaatcatgcgtaaaataaggtgtcttatccttgaccccaccccttccccaattaaatttccaggatgttaccactgtttgcagttggtgtgaatctctctttaataatactctgtttatctcacttgtcgttttacgccaaaatacccattgaattatattattgctgaagaccattcttttttttttttttttttttgagatggattcttgctctgttgcccaggctggagtgcaatggtgtgatctcggctcactgcaacctctgcctcctgggttcaagtgattctcctgcctcagcctcctgagtttctgggattacaggtgcacaccaccacacctggctaatttttgtatttttagtaaagacagggtttcaccatgttggtcaggctggtctcgaactcctgacctcatgatccaccctccttggcctcccaaaatgctgggattacaggcatgagccaccacacctgcccagaccattctgttctactgaatcatgtgtggtgggcacctcttatatcaatacatatggattttatcttgtgtttgttattggctcccctttttctcattgcatggctacactcaatgctttgtccacacccctgttcctgggttggaatcttgtgacagaaaatgaagtaacaaaggctaaagctttctaaagtggagtcaggagattgcaagacaattgcactttcaccagcaagagctcaaaccacagaatgttccaatagatttggataaacagctgaagtcagtattcaccagccttcaacatctcaactaggagaaccctaaaattaactaagcacatagaatggaatggacttgtgatttaggattccttctcagccaatgagctgcttctgaaaacaactttttgtggaaattacctgtaaagaaaaccctctcctgtgcttgtcttacagaacactagtcagggctgccctgattcagtggacccgaattgctattatttgtttcctaaacatatggtattttctgtgaccttcatctcaatcttttttttaagttactgggctgtttcccagttttcataatgacgagacattctgcagtgtttcatacacatgtcttttccccatgtggagtattgatccaggagctcattcagtcaacgcatgtttatgaagcatcctgtgccaggctgtgggctggtcactgtcttcagcagagagaggacaggcacagtcttgccttcacagagctcacagctcagggaggctcttagaagtgggatactggtcggagcatgtgcacattaaacatgatgaggtcaaggttgctatagggactaaaccacagtcccaccaagatcgcattgagttcctgtggtagaccagaggtcagggcccctaagatgtcctgagcagctccctctgctcagaagttttggttccacaggtgacacacctgagcacaggtgacccctgcagaacctgtgattaccacccaaagccaagagtgagtggtgggtgttctaggaggaaccgtcacctccatgggcagggttggggaagactgaggggagcaggtggctgatgactttggccagaaggtagggggatgggcaggtgtgcgctcatagggaagggaagagaagggagggcattgcaggcaacaacacaaaggttggaacctgccttcatggactgagaaaagcagggagtccacccaggctgcagctggggagggaagacatggggagcagtgggtctaggggagaagcagactgcgattgaccttggggactgggcagtgagcagaggtgtgttatgtgtgtctgtccccatcatagatatgaggaggggtgaggccgcgggtggcacctgggtcggtgggatttcatagtgcctgctgttccctagagcctctctgtatagagggtcagaatagatctgaggctgtggtctgggggaaggggctggtggtgcttaccatctctaggggtgggaggagagggatgaggatgcccctgagcagtgaagcctcaaggtgtgtggagccacagttgtctctcattagacatgtgttttgcgtgaggatgccagggcctggtggttattactgttgtcaagtttgcatgacaaggacccaggtatccagggatccagagcacagggcccctggtgaggggatgaggctcagatggggctgaccaggttcatgtggtcagagtgggagggactgatggagagacagagcctcaacccctcctgtcaggagctgtggctatgtccaggagagatgacaaggatgacccaggacattgagtgagtcattgagacattgaaggtgaggacagggcagagaggaccctggtgactgctgaaatgtaggatgtgaggagggctctgacccatgcaagttacaggacctccccacccccgagcccacagatgacccttaaattgggcatcctgagtgctgtgtgtgcccagcagggacactggataggctggacctgagtctctgtaagggcagcgctggtctgtaggaccagagtcttctctgtgggtgtgacgtgggcaggaattagcaagatgggggtgacaaggcttggcttggaggatctggtacagaagcccatgggcttggtcagctcagcttctcaggggctcagctggggctggaggagcaggatgctgtgctcagggcatgctccaggcagcgtgatgtgtgtggttccagggtcaggcacgggggtcaaaaattaaccatgaaaagttcccaccttctgtaggcagagaaaatggcctgattgtcagggtcagggagacttaccatgtggccaaagcaggctctcagcctcccagagaccacaccctgggtgcagcactcagctctgcagggtatggcaatagatgtgccaagaaccccaacatccagatgcatgcaaaaattttgcgatatataaaatagagcagatcaagtttccctgcaataacgttgttcctggttgtgtctttttcttgtaaactagacatggacatctttccagcagtctgttctcatctgccaccttcctgctgcagcacctcagaatgaacattcctgagacactgtccgtggtgctgacgaccaagagctatggaacagagtgtgatgtagaatcttctagttacctctgctctcctttcacttttaacaacagagcatcattaacaatgagaaggtggagaggtgttcaggatcttgaagtgacttctgtcttgctctcccataaccctgaagctgctgtagacattattgcagaaactgacaccacagtcaggatggccttgtccaggagcccatgtgcagtttgtagtgagcaaggatgagaaaatggtcttgaaaggggtgatggacagaacaggggcttttcaaaaatgtcacatcatcacccccagcatccgtgaatctgtcacatggtaagagaccttacagattaaatgaaggattatgagtttggaagattattgtagtttatccagatgggtccaacataatcacagaatcccttccttacaaatgagagagggaggtgggagagtcagagaaggaggaggagatgtggggatagatgcagaagacagagcggtgtcaagatgctgcactgctggctttgaagatggagaaagaggacacagccaaggatgcaggaggcctctaggaggtggaaaaggagaggaaacgcactctgccctggagcctccagaaagaacgcagccatgtgggcaccttggttcaagtttctgtgtcacttagcttgtgggaatttgtcacagcctcaacaggaacctacagaggagtcaccttgtgtgcaggtgggatccagggtcatttacagctaaatcctgatgtaaatattgcaggttgcttttcctacttcctatctcatggccaacaaccctggacaatggcagaacacccttggaaaccacggctctgtgctttagtggagggaccagcttgtttgtgggaaggtagcacctggtccaagtgaacctacatgagatcgttactctccccagggccctcagggaagggctgagaacagctggcccaggtgtgtggaggagctgcaggtgaggcagggctggaggggcctgtgggtccaggtagaggggcagacaggttgtcccatcgccatgggagcctgcacgagctttaggttggggaaccctgctcctctgacctggacgctcctgtgtggagaggaggcttgctcagtgagatccacgccagggggtaaattgggaactgatgggaaatgaggggctagagtcctgggtagtgcctgggaggaccttgctcaaggactgaattcttggtctgttcccaccttggttactctgacaacccctctctgtgtcccacggggataaagatctcctgagcagtggccattgggacagaggagaacctggtggccagagctaagcatccaggatcctggatttggggacaggcaagctcattgctgggggacagtgatagatacggcctccagggcctgggtgaagagagcaggagggctcaggacactggaggctgtgtggaggtcacacccacgatctgtaccacccatggatgctcctgcattgctcacctttgtgtggacatcagatggccccaacttttgcactcctgagacatctcatgcattcacagagggacccaggctggggctgtgcatggccttggtctctagggtagtgtgaggacagctgagcactcagctggctgggcaggactcctgcgaatcctgccctttcctgtgtagggtccaccccagcctgactcctaaccccctactcctgtctttccagggaagagagactggggttgagataaggtggagatatttttcctgtgtgacccaggagagaatggacatggagtttcaggtgagtttctgctaagttcccatgagcagaaaaagagccaatgagaggaagtttcccctttattcagatcctttccaggtgaccccgggtgggccataggcccattcactttccctgcaagcccccgcttcctgtggtgatgggaagccttcgccttggcccacccagagcccggggcagtctgttgaggtctctatatattcagcagggacccccatcccttcctgtccccaggcctgtgtctcctcaggactcagagctggttctctggctcaggctccatgtccttccccatccccagggctgggggcttcagggacgctccatcaacccacaggagcagctcccagaggaacctaagaagccacatctgctttgtggtcgatccagcagtaaatgtttgtgtcagagtgtagcaattccagtaaaaacagagaagaggtcttgacccctgaggccttctcagaacagggtctggcatctctctctgggcccacccagggctactctgggactgaacctggctgtgctcagggggttcctgctcccaggcccctccctcctctgctcaccacctcctgttattttcactgcagtttcctgaacttcagctcagccagatgccagtggggacagatcctgggtctccctggggcccaagggaccagaatatctgtggcccccactcacctcatagatgagagcagctgccctggtgctgggtaggggaatctgggcaggggagagaggggtgtcaggggacagggaaggattcctgctgtgtaggaattccagggctctcctcaggtgatggagggtcccagggtggggttagcacagggagtggatgatcctggccctgaacagaggcccagctcatggccagggcaggtctaaccttatccaagtcattctgggtagggtgggtttgtgctggggattgacagtccccctgccctgagcctgcacagctggggccccagtggaaatgggattgggaacggacagtcttacctaggagatggagctgtcagagggtccatggcctggggacagagacaaaagtgagcacgagagtgttaggatagctgggcccctcctgcaagagtgtgtgggggtcctcagttcttagagaattggggagagggagcctttctcaggttattttaggggtcaagtaagcaagtgaggttgaggaagtgacccatgacccagagcccggaggttagggctgacccggccagttggggtttcctgtgtgatgttttatgggatcctctttgcagccccagggatagggtcagaggcccctgggtgtaactggcaggagtggacaacttggggctggcttagtagttcccagccacacccagactgaagggacactcaccgggggtggaggctgggggctgctgctccctgaagtcactctgatcgctggccctaggaaaggtcagggttatttgtgaaggtgcaaggttaaaagtcacaaattggagttaaaataggggaccaggaaaggagcctatttccaagaggggtatggagacctcctttctttatggagttctgtggtaggaggggcccaggtgaggggagttgaggaaaggccttacaaagccacatctgtcctggccagaggggaaggactctcaggcagatgctgggccaggagaacattgatccagtgacacaggaaagggactgaggacccagggaaggaatcagaccaccaggggttgcctgagaggaagggtcaaggcaccagggggaaagcagggccaggcacatgtgcaggacactgaggggactgcatgcatcttggattctcctggaactcagtgtccctgctgtgaccagacactccactcagggctggagatgctgaaatgggacaatgatcttgtcttctgtctctgccctttggcaagagacataaacgacattccaggatatgccatattggggccccggttctcccttctcacagctcagtgtctgcagttaccatgtcagtcaaaggggtgctgaccccacccagcccgtccaggctgttccagtctccactatgtgataatgcccaggatcccccctcagatgccctctcactgggtggatggattcagtgaacagggggaggtaccaggtattgagcaccgctcccccctgctccaggcagctgtggctttgctgtgctaggaaactaggaccatgctcaggggcatggccttaattggactgaattcactgaggacaaagctgttgaggaagcagcccagggtcagcagctggtgaggaaggtgccatggaatgagagggaaggatccctggggagtcgggaggctggggagagcctggcactgaatacaagacagggtctccttccttctcgcctggggtcagcgtgaaggatgggagcagaatggggaaaagctgtggtacctgccagtttttcggaggagcaggaaacacacaagtgcagccaccagaagactcccaaccaggaccccgatcaggatgcctagagtgttgtcatctgctgaaagaagaaggcaaaggggatgaggtccaaatctgttccagggggaaccatgaggggccttgcagggcaggggcatggtcagggaggaaggaaatgccatggagcctgagtgtggtctgttgtgctgtcctcatagctggctcccttgctctccgtggttgcaccattttctgtgtcttaggcttgaattactgggatgcatcaactcctacattctcccacaggaagcctgcacctcatcctgctcctgtgttttttagtccctccttcctctcacatcactcctcttccccctgtttctttttttccatcccatggcagtcgtaaagggcaggcccttgctgccaactcaatgctgatgagcagggatgatgttcattgactgttttcaggggccttccacatggaaggcacagtgggaatcaatctacctgcagcttttctcaccctcccattgccttgagggagaagggtatgtgatattgtgaaatacgtatttggtgttcatcaccattgatatggttaggctctgtatccccacccaaatctcaccttgaattgtaataatccccatgtgttatgggagggaccttgtgggaggtaattgaatcatgagggtgggttttttccatcctgttcttgtgatagtgaataagtctcaggagatcagatggtttcataaagggaagcttccctacacatgtcctcttgcctgctgccatgtaagacatgcctttcaccttccatcatgattgtgagacctctccagccatgtggaattgtgaatcaattaaacctctttcttcatacattaccaagtctcaggtatgtcttcattagcagtgtgagaatggactaatacagtaaattggtaccagctagtggagtgctgctataaagatacctgaaaatgtggaagtgactttggaactgggtaacaggcagaggttggaacagtttggagggctcagaagaagacacaggaaaaaagtttgaaacttcctagagacttgttgaatggttttgattaaaacgctgatagtgatatggacaataaagtccaagctgaggtggtctcagacagagatgaggaacttcttgggaactggaacaaaggtgactcttgttatactctagaaaagagattggtggtattttgcccctgccctagagatctgcagaactttgaacttgagggaaatgatttagggcaactggtggaaaaaaaattctaagcagcaaagtgttcaagatgtgacttgggtactgttaaaaacactcagttttatgtatttacaaaggtatggtttggaattggaacttatgtttaaaagggaagcagagcataaaagtttggaaaatttgcagcctgatgatgcaatagaaaagaaaaatccattttctgaggagaaattcaagccagctgcagaaatgtgcataaacaatgaagagcaaaatgttaatccccaagacaatggcaaaaatgtctccagggcatgtcagagaccttcctggaagccccttccatcacaggactggaggcctaggaggaaaaaatgtttcctgggccaggcccagggctcccctgctgtgtgcggcctagagacttggtgccctgcatcccagccactccagccatggctaaagagggccaaggtacagctggggccatggcttcagagggtgcaagccccaaaccttggcagcttccatgtggtgttgagcctgcaggtgcacagaagtcaaggattgaggtttgggaaccttcgcctagatttcagaggatgtatgaaaatgcttggatgtccaggtgaaagtttgctgcagaagcagagccctcatggagaacctctgctagggaagtgttgaagggaaatgtggggttggaaccccgacacagagtccctactggggcactgcctaatggagctgtgagaagaagaccacaatcctccagaccccagaatggtagatccactaacagcttgcaccatgcacctagaaaagctgcagacactcaacgccagcctatgaaagcagccaggagtggggctgtaccctgcaaagccacaggggtggagcccaaggctatgggagttcagctcttgcatcagtgtgacctggatgtgagacatggatacaaaggagatcatttcagagcattaagatttggctgccctgctggattttgggcttgcatggggcctgtagcccctttgttttggccagtttctcccatttggaatgggtgtatttacccagtgcctgtacacccattatatctaggaagtaactaagcttgcttttgattttacaggcttataggtggaagggacttgccttgtctcagatgaaactttggacttggacttttgggttaatgctggaatgagttaagactttggggaactgttggaaggcatgattagttttgaaatgtgaggacatgagatttgggaggggtcgggtggaatgacatggtttggctcttcttcacccaaatatcaccttgaattttaataatccccacgtgttgggggaaggacccagtgggaggtaactgaatcatgggggtggattcttcccatgctgttctcatgatagtgaataagtctcacaagatctgatggttttagaaaggggagttcctctacacatgccctcttgcctgccgccatgtaagacatgccttttgccttctgccatgatttcaaggcctccccagctatgtggaactgtaagtcaattaaacctcatttttaaaaaaattacccagtctcaggtatgtctttatcagcagccaagaccagctcggtcgcggagatcctaacccagcagtgctagaggaattaaagacacacatagaaatatagaggtgtgaagtgggaaatcagggttctcacaggcttcagagctgagagccccaaacagagatttacccacatatttaataacagcaaaccagtcattagcattgtttctatagatattaaattaactaaaagtatcccttatgggaaaccaagggatgggccgaattaaaggaataggttgggctagttaactgcaacaggaacacgcccttaagatgcagattgctcatgctattgtttgtggcttaagaacgcctttaagcggttttccaccctgggtgggacaggtattccttgccctcattcctgtaaacccataaccttccagcttgggcattagggccattatgaacatgttacagtgctgcagagattttgtttatgaccagttttggggccagtttatggccagattttggggggcttgctcccaacagactaatacacccattttctggtatgtgactctaaagtccttagaatcttcaaagtgatgtctttttcaagctaataattgactgatgactggcagcccctaggcaacttcagaatgaggctggtcactgacccaggtaggattagagggttgggactttcagcctcacccctaatccctggggagggacctggagtttgaattaatcaccaatgaccaatgaatcaattaatggccaatgattgaatcaattaatggccaatgattaaatcaatcatatctatgtcatgaaccccaaaaggactgggtttgaagagctgaacccatggaagtttctggagtgtggtgcatctggggagggcatggaagctccacaccccttcccacatgccatgctctgtgcatctcttcatctgcatcctttgtaaagtcctttattacaaaccggtaagcctaagtatgtgtttccctgagtcctgagagctgtttgagcaaactaatccaacccaaacagggagtcatggaaacctcaatgtgaagccagtcataagaagctctggaggcccagacttgtgactggtgggaaggtggtggcaattttgtgggactgagccctctgctgatatgtccaggtagatagtgtcaggatggaattggaggacacctagctgatgtacggtgcagaactgattggctgctgggtgtgtgggagaaacccccccgcatcacatttggtcacagaagtgtgtctgtgttgatgattgttattgtggagtgagagcagaggaaaaacacagtttgagtttttccaaacagggtggaatcccatctgccaatttagaatctgaaacttatagtttcagtacttcaattaagattgaagtacttcaattcagtacttcaattaagattcagtacttcaattaagattcagtacttcaattaagattacagaactggtaagtgaaagtgatacaacaaaaatgtaaccaaagtctgctcaacttaacagctaataacaacaaagttcataaaaataataccagtcgatattgatagcactgattgagccctggctctgtgcatgaccttgttaagggctttaatcgcattaatctctgaataaatatcctcacaaccaccctgagatccaggtgtttgtaacaattctacagatgaggaaactgaggcccaggaggttgagtgtcttgcccaaggtcaaatacctggtacctattgtaaccaggatgataactggatgagtctaatccctgagttcttacccacattgctccccaggctctgaaggaatctcatccttctcattccgtgtatcattttacaccccccctccctcctaggaaaatatacaaggaaaggagtgagaggggccgagggtcactcacattttacagtcagcttgagggggtcgctcctgttggagctgactgggttggagacctcacactgatactccccagcgtcctcctgcctgatggggtctatggtgagcatatggttaaaccaggacagcttcatcctcttcgtgacctgcagacgctggttgttgaaaatccactggaaagaggttccagtgttatttgtgtggcaggtcaggaccacggagcccttctctgtgactgtggtgctgctggcttggatggagggctgagccactgactctgtggatagagtgaccaacagaaagtgtcttggggccatgctgcatcctcagagatctcagagtcaaatttagaacattctcctgtgaataaaggagaaagatgaaggacagggaggagcagagagaaccagagacacccatagcagcgagcagtagggactacagtgacctcagagaccccagggaccaggaggacccagctgcctcagaccaggaccagggagccctgaaaaccctcccacagatgagcggccccagagtcacatgagatgcaatacctggggtggctttaggagcaggcagtcagagaaatggaacatgggtctcagcccctaagggacaaggaagaggtgtggccagctcctcctaggatcctacatccaggacccagtctgtaaagaggttatgattattcctttcttttttcattaattccctccctccttcatcagagaactactgagtgtgtgtctcagttgggccttgtgcaggtacagggtgtagtgggaagagaaagctgagtcctttccttcatcctcccatgggagtgacatcaacaaatcaagaaattcatgatttcacgtccagtgagggaagaaatgtggatctgatgggagaggcttggacaatcctggcattgagtctgatagttgagacaggtgatttcgttctaagtaaaaactgactaattctccatttgcccgtcattcctcagaccagaatctccctctctgagctgaggatgcccaagaagaaaggagctgaaccaacatctggtcctggggtccacagatgccccacggtggtggccacgaccagattctgggctgcagacacacggtggtgtgacgttgagcactgacagcctgtgtgatgctgatgcaatttctctttaataaaatggggtaaatgtcaatggtccctggcttgccatcctctctgtaaattaacattaaaatatttacaattacctgacctaaagcttggcacagaatagctccaaataaacatcatctattattattttactccaaaaaaaaaaaaaaaagagttctctgggcctgattcctggtggagaaggagcggtccagagtgtcttttctctgctttccctcctcctgaggacagtgcacttcccgggacatcttttaagtttcccatccagtttaatggcctgggaagtttgtttgtctgtcctctccactctgactctcaggtgaaagatgaggctctgcccttgcccagatggggctctgggggctgagccctgcctggtgaccagctctaggaaccacggccctgggacagctggtaaatcgttgctcacaatcagccctgcccaggaagccacaacccagccctggcacaggctccccagggtcatctggagtcaggatcttgggacaggggcctggggcaggggcttgaagggctgagcttctctcagaggatcctcaggccaggccctgactgagtcctataagatctttctcaggtcatgtctatgaggaggaggccaagcggggttggactgagactgattttcccccgctgcatctcccgcatcagactatccttcttgctgtagggaatttccacggagtccggataagggaaaggaattctgatctgttatagtttgtctcccctgggtgtgtcctgcactaaatgcccaaaccccaacatgggacgtaatgcagagggggatgcaggcacagcccaggcctgacaatcctgcgtatgtgaagcagaactgacccccaacacccagaggcacggaggaatcactcaccgtatacacggagatggtgagatgcctgttcaatctgagaatttctgtatgtgacttgtagggtgtagtatcccgtgtcctctagggtgacgttctggaaatgcagatctccactgggtgatattgtctctcgaccgctgtatgcaggccctggagtcctaacgtgagtgtctattacatatgctgcgattagctggttgggctccaccgttttccctttgtaccagccatagctgtaaagattctcgggcagataaaccacagagagatgaacattctccccttcagcaacttcaaagggcgctgatgcaataaagagccaggcagtggtgggtgcgttccagaaagttaaaagtgaggctaggaaagggagagaatatcagtcaatatttgacctatgcattggcatggaaagacggggtcctgggtgcaggtctcttcacccctcagccttagagggtgtgtgtgtgtgtgtgtgtcctactgggtcaaagtcagcagcatgaccctcattccttcagtacctctgaccttggcatttccttgtgtgaaccctctttcccaggggtctgcatggttccctccccactgccttcagttcctactcacacaagggaatccctgggagacttctttcgtgaagcctcctctagagaccctgggtcttccctttctgacctttcccagctctgttccctccagggctcttgtcagcacctgacctcacattctagatctctttgggtgtctgtcttcccccccatgagattgtgagctctgtgagggcatggacttgagtgatgttagttgcaccccagtgcctgggacaggctgcagactcctgtggatgagttcatgagcgttcccagggccttccatatcctggggtttatttgctaatgtctgaggttggcagatgaagacagagtttcatgccctggtggtgtttttatttaaattgtcactgtgatatagttttactatcattttcaaaatgtagtggccactgacaatgaacttgaaaacatggaccaactgagattgttttgccccttggcaattccagttcacttagattttttggttctccttagacgctctctcccctgagtctctaacaaaagccctctgtctcctctcagagccccatcctccccaggagaccccagccagtctctgtgctccctcctcccacccactcccagggagtcctcccctcacctgtgagcaagagcccctgccaggggatgcattctctgtggggacaagctgaggggggccccatggtctctgctgcctgctctgtcctcctctgtggagaggagcttgggctccaggaacgctctagacagggttactgtgactgttgtctctgctgtccttccttcctctatgctgagcttcctctcaggcaggagcacttcccgtttatgggcaagggcggggctctgcctacaatgtctctctgtcccctcccctctcagtcctgcctcccttgtccctcctttctccttcctttttgcctatatttggttccctaggcaaaactttgagaagcaacgctgatggggtcctcataacaggacgacccactctccccagtactgacctctgctgtgttctggccttggttctgtcacagccggtagattatttccctttgtgacacacaaaaccagctgggccctgggtctcctcatgctctccagtgctccaggaaggcagaatgatgcccagcaggaaagtgacagaggtggctctgggggctagaaaggggctcactgggtgatggctgggaaggacccacccgctatcttcagtgtcaccagcctggcctctgacccagggacagagacccaggcctggaggtctcgggaggatccccagctcctaggtgtggagggaggtgtcctgtgtgtcctgggaagagaggactttgatggaaggaggtgggaggctctgggttctgctgtccttggtgaaggtttcagggggaccctctccatgtctggggtctgtgcccccagcttaactctcattctctttgcaaatacatatattttgtggatctgcagttgcctgaactgtctcatgtccctaaatctttgtatccctttttacagaaggtcaggaagggtgtgtacatgagtatgaggactatctgatcagggcgagtgtttgtttcccaaagatctctttagatatggtataatacataagataaatgtactgaattagcaattttaagtgtagaattaaatgatactaattctattcacaatgttgtacaaccatcaccataattttttaccagaaaatcttcattataccaaatggaaacttcatacttttaatcaataactccccacttccccctgccccacccactggtagcctctgatactatcaatctctgtgaatttgcctagtttacatgtctcatataataaggaattatatacgtgtattatttttttctggattatttctcttagggtaacacttttaagattcatccacgtcgtagcatatattacagcttctttcctatttatggctgagtaatatcccaatatatgtttatacctcaattttaattcattcatctcttaatggacatgtgggtggtttccacatttttgctattgtgaaaaccgctgcaatgaacttacacttggaagtatctgtttgggtttctgtgttcatttctttgggggtacatataggagtataaatatggggtcatgtggtagttctatgtttaagtttttgagaaacagccaaactgttttccagtttgctgtgctattttatattcccatcagcaatatacgagggttccattttctctacattcttgtaaacacttactatttaatattttttaaaacttatagccattctagtaggtgtgaagtgatagctcattgcagttttgattttcatttccctggtggctgatgaagttgagcattttttcatgtatttactgacaattttaatattttttagagaactatttattcaaatcatttgctgtttaaaaaaaatgggttatctttttattattcagttgtaatagttctttatatattttagatacaagtcccttatggggtacatgatttgcaaaatttttctcatattctgtgtcttctcactttcttcatggtgttctttgaagcacaaacatttttaactttgatgaagttcacttatctatttttaattttgttacttatgctcttgatgtcatattgaagaaaccattgcccaatccaagatcattaagttttactcctatatgttcttctaatggtttgataagttttgctattccatttaggtttttgaaacattttgagttaacttttgtatgggctgtgaggtaggggtctaactacactatctcgcatgtggttatccagttgttccagcacaatatgaagaggctaccattctttccccattgaggaatcttggcacccatgtcaaaaaccaatgggctgtaatggtgagggtttatttctggactcttgattctattccattgatctctatgtgcattcttgtgccagaagcacactgttttaatgattgtagtgttttagtaagttttcaaattaggaagtgagtcctccaatttttttttccagattgttttggccattctggggtgacttttaaaaaagatgtagttcaatggttctcaaagcaggagtggttcagctctccttttttggcagtctggagacctttttaggaccttaatctaagtagataaattattcccactttcttttctgagttgctatgttacagtgtatattgacacccatgaaataattgagagaccctggaagtgcttgcctacatagtgagggacaattagttccatgatcatgggcacagaagattttgttttgggaaacaattttgttggtggagttatattcatgcttactcttttatttgtcttcatagcctgcatctccttcagacttcatatctgtttattttcttgtttgtcctctggggtttgggtgttgggtgaccagtcagctggagctggaggaggtgcttagcaaggcagtgaccctggttgggaggagcagggctcagcagggtgaaagtagctgggccttgagtcaggagtggcatctggaaggcctgactgtaagggtcagaagggccagcaggtgggtgtcctaggcacaaacggtggctgctgctgtggactggaggaaggtaagaggccccgagtattccatgttcttactggctccccaactgaggattcctctcctgggctggtgctgtcctgcagcagggaggggttagacagggacggctgcacatcaggccggagtccatgtcatcctcttaggcactgtcactacagattgaggattctgttcataagccaagcctttgcacaaggaagggacccgggctctcaaggaagagcagctcctggtcagacctccatctccttctctctcattgcctgaggcctcaagcttggtctacctggcacaggggtctggatcctcctcccagggttggggtcttactgagctgggcacctgcaggtgggagaagatctggaggggccccatctgccttcaccagattgatgttgagggtccctgagtcctgcaccactatcaggtgctgagcaacttccagtgtcagtgacaaccaccccatggtggaagcagaaccacctcgtgagaaagcacctccaagcctcagtgcttgccatgtgtgggaatttgctggtttcagttgggggcatgttggtgggtggtcatgaattcagggccggattctatgctcacagtgcacatgctggatgtggtacagaccccaggcagggctcagtggggtggttttgggtgtgcacaggtatcttttctggaggagctggtggtgatttggctcccagaagttcctgagctctgcagactcaccaagcactcaatatttgagtgaacattgggcgagagagcagaaggtaagtgtcagggcatcggggttggtgcctctgggaagaggaggaacattctgggaacaaagctctcccccggcttacagggagcttcccatcgctcctgccttgaggatcagggaaactagggcctctgctcttccaggggctgcttgcaggcagtttgctctgggagggggtgacccaggagttgcctctcattttgcatttgagatttaaaaggagaagggacagtatatcttgccaggtcacaaaaattacaggcatcatattgactgaagggcactcctgtcatcactgcaatataccagaatggtcttttaaaaaaataagtgatttaggtttaccagcaactgtaatgcttgttttattcttctagttcaccgttaatgtcacttttgtagttttagcactggcaatgttgattttatgttgactctgatgattttaagctttcatttgttcacatagagatcatcttctttctgaatattaatgcattttttctctatttctactggttattcctgtacatagagtagagaatcacttttcccaaggaggtggaaagcttctgactaccaaaaaaaaaaaaaagtgtcaaaatgctttaaagtcagtaacttaaagatcaaatccaagagtgggcaacagattctgcccagggtctgaaaggtggagaggtgactggtgaggatgtttaaaagacctctcctctctactccctaaatgggggccatccagtgttcttgaggttcagagaaggcccagggctggggcagcagggcactgtcagctcccagctcccaggggccaggagtaagaccccaacactgtccagacactgattgcattcattttgggggagagtagattcttatttaaagaataatacaaaagtctacaaatatgaacataaacagaaattcctttgctacaattttccccttaataagacattccttcctaatgacatatgtgactgcattcatggctgagatgttttctaggatggtgagagcatcagagtggactatctggtgccttggggtcatgcattttcttcttccaatgtctacaggatcccccatgtcccactttgtagtgtaactcagtgtgtgtcattctggtttttgttgtatagatccttggaaagcccatgtcattcctgctgtgaggtacaggcagccaaatggcatcatctctaaacatgccttctcctggtacatcaaattatggaataaatgaaagccattttgacagatattgaagatataagtttctactcttcccacacatgcttctcccaagtgaaggattttactggtgaattgttattagagattagtgtggatcagtgactctgccaggggaaattttgccctctaggggacatttggcaaagtctggaaacattgttggttgtcagagctgggggagggagtcctgctggcattgagtgggtggatggtgctgaacaccctgcagttcacagagccccaccagtttgaccacccaaatgtcaatgctgaggagtggagagccctgctgtgccctcccgcagcttccctgaagcttcccctcacctgctcctcccatgtctccccaccacttccccacttcacccgcctccttacacctcagtcccctccacctgaactcaccccttagtccaaggccagccctgatctccgctctcctggtctccttgctccttagcaggaggcgcccactagatggcgcccttgcccttactggagctcaccgtctccctttccaccctgagacaaatgtggctgcttttactgccacaaccccagccctccacactctagatttgctcagggagcagctcctggacagacctcagggaccccagggaggagcctcactctggagattttgatggcatggtctttgaacttcactgttacccccagtcaggatccaggatgttgggagtgcatgattctgcccggtcccacttcagcaggaccccactgctgagttgtctgtggggacccgggcctctcatctccttcttgcattgcaggagagggatcttagcactgctttcacataaagtcagataatggaggagtgcaggtgagtttgggaaggtggacatgaagagaggttgtgtccctagaggtggcagcagtgagaggatgggcaggtgggaggaacacagcccatccagggttgccagccatattaggagcgacagcctttcctctaagcctccagcctttttcctgaaacattccagaactttccacttcagcacttcccactgaggctcctcaggtctgtccctgagctcccagctgagcctacctacccatctgaaatcctgagtcctgtgtcaccctcgttccccattattctgtgcagttctgtgggacgcccagctctcctgacacccccagtcttcagaatggccatcagcgctgtcgctgtggcaccagggtgactgccgcctggaggctgagtcctggcttcctgacagctgtggggcccgctctaggctcccttgtcctgatcattcatcacctccaggatgcacagcagctgggccagggggaggagcagggacaggtgtcagccaccctgtgtgtctgcaagtcaggctgggggtgtgggaggacgccaggaatgactgaactttctgatttagagggtgagagcttgcactgatggaatttgggatttaataggaaaagcatagcgttttcctattttgtaggcagggtggctggagtttggaatcatagattcccctgggatgtcactgtggacctcagtcccacccgttaggggcacagatttcagaatccacaccctggggcaaagcaggcatgggaggctccatcagcctggccagggctctctatttgtgcagctgctgcaaggagatgtgcactctgatgggaacagtgctccctcctccttggggggcagtatctagctccctgcagcccctctccctgcaggccctgccctctctgaacctcaccttccccaacccgccccccgcaatcccatctcagctgtaatcccaacactttctcatccattatgggtggactgcttgagcccaggggttcaagactatgctggctggacaatatagcgagttgttgtctctacaaaaagacaaaaattagctgtgcatggtggcatacacctgtagtcccagtcactcaggaggctgaggtgggaggattgcttgagctggggaggctgagttggcagtgagttgagattgtgccactgtatacttcagtgtaggtaacagagcgagaccctgtctcaaaaaataaaagtaaaaaaaaaaaaagaaatatggaatacattattgttaactctaatcaaccatgctatgcaatagtccaccagtaataccagtaatagccaataatgaattatctgaaaaagaatacaatttattcttagctatctactgctaaaatttttaagctatcttttatgatagctgaaacaaaagaagtaaatttaaccaaggaagtaaaagacctttataatgaaaactgtaaaacattgatgaaataaattgaaaaagacacacgcacaaatagaagatattccatgttcatgaattggaagaactgatattgctaaaatgtccttaccacccaaagtggtctacagattcaatgcaatttctgtcaaaacaccaatgatattcttcgaagaagtagaagatcctaaaattagaaaccacaaaaattcctaaaacctgcacaaaacaccctgagttgccaaagcaatcttaaacaaatagaacaaagctagtggcattacacttcctgacaatcaaagcatactgcaaagctatagtaaccaaatcagcatggtcctggcataaaaacaagcacatagatcaatgaaacagaataaaaatcccagaaataaacccatgcatctctagctaactgattttcagccaaggagccacatgcacacaatggggaaaggacagcctcttcaataagtggtgctggggaattggatattcatatgcagaagaatgaacctagaccctatccctcaccatgcacaaaaaattaactcaaaatgtattaaataaagacttaaatgtaagaactgaaactatgaaactactagaagaaaatatagggggaaaatccatgacattggtctaggcaaagagtttttggataaaatctcaacagcataagcaacaaaaccaaatataaacaaacgggatttcatcaaactaaaaagcttttatacagcaaagaaaaaaaaggccagcagagcaaagagacaacctacaaatgggaggagaatatatttgtaaatatatacatatatatttgtaaatatatacatctgataagaagataatatccaaaatatataagaaaattatgtttctgtatagttttatctgactgggatacagaggccacatccacagtcccatcctcaaaggccacttgttcccaaaatgtcaagcacatccctcaatgatccatcatcaacacctatgtctgtaggatgaagggtgaatcatgaagcactaaaaaggaagaaggaagccaatcccaaaacaaaatgatgcagggtctggaaagtccaaagcattttttttttttttttactgcatcttcctcctttcttctccacattcccaatcctcactattgattaacaaaacaaaaaaaactgggacccaccatcttccctactgtcaggagatctagcgagattgtttgagtcttagaccaaactttgccataagccaaatttctggctgactttacaatgatatgagctagcacagtctctttttctgccagtcaacttgtgctcggttttatttgcaaccaaatagaggtggtaaccaaatataggtgaccctaaaattagtcatcaggatgaaatcctaaaatgtgcaacaaactgggttgaattcaggattagtagcaacatctctgttgtgggcttgaaaagggggcacccttttatgcagtagcaaaattgctaaattgttgtttgctgagtctttggactctcatcccggattttctatgaccattcaaacagggctgcaatgaacatctatggttgtttagcttggcacacttctacatttctatatagtaatatctagaagtgcatttgctcaatcacaagatatgcacattttataattgactgctatcgaactaccttaaatagccttaatttgttctcaacattgtttaacagggtctgtttaatgtcctacgtccagcaaggacagtatcacttttcttaatatttttcaaattattggaccttaacaaatacttaatgtgcaattaattgattcctttgtattcccatgccttcttttatatgtttccttatagtacacaaaaccacattattgtttctttacttgtgtcattccaccctggaccattcctatctaaactataacattatgagagagagagagagagaaaacaatatgaaaatataaattgattaatcaaaaaaatttaaataggacaaatcaggaagacacaagagagattttaaaattattcagagaataccacaatagctgtaccaatatattttaaaacttagatgaaacggacaactatctcgataaatgtaaattaccaaaactgactcatgaaaaaatggatattatgaatagagcaataatcagtaaagcaattaaaaagacagttgataatttttatttactgacaacaataacaaaatttcaggtcctgatatttttatggtgaattttaacaaattttcaagctcctcctcaaccaattctcagaaggtttaaaactttaacaagaaaacactttctaacacattttcagaagctgttatagcatgataccaaaaccacacaagaaaattatagaccaatctcacttacaaatatacatgcaaaatcaaacaaaatcttagtgaaccaaattcagaattaataatagcaaacaagcaaaatatgttatcatacgtatggcttatatcaggaatgcaagtatgtttcaacatcagaaaatacttctccacattaacagactaaaggagaaaaacgcttgtttaattatctcaataggtttttagagaattttgaaaattttataaagttatgcgtattctgtaaaattgatgaaatccaaccttgatttatttttaaaaattgcctttcctatagaattataggtaaaggaaacacatgcatcctcacagagctacttcaaggctaagttacttcccataagtaacgtatcctgtaatgtgtgcttggcacatattcaatactaaacaaatatttgcaaatcctcaaaccacttctcgctcaaataacccacctttgtcttttgcctttatgttagggttgattttctcaattgtatcttggagatcctttggtgggtctttcagcaattaccctgaatttgcttttctgtttacaattttaattcctgggaactctttcttgttctctgactgcacccttttcatgagagttcagccatcaatcctccagaaccccaccccccccgcccccccaaaaagcaataaagatgtctaaaagcttccttctgggctttcgaatgatgtttaccccaggcatttgttctattcgttcatcacccattttccctacaacttgcctacacttgatatcagatttttatttattagtcacctatcttcttcattggcccattttcctattttgccactggttgttctcaaatgtgttatgattcctggttgtacagtcaagtggttgataatcttggatatacgataaagatttgctctgtagctgtgtgtaagcctatataaaagcttttgtatttttcttcttaaaaaagacaaaagatggttgggaagatccctccagttcaccagttcgaggctgcagtgagctatgatagcgccgctgctctagcctgtctgtctgtgaaaaacaaggggggcggggggcgggggggaagactggagatgtaaatctcccgcagggccctacccgtatccgcaacaggtctctaacaggaacagcctcaggcctgtgttggaacaaggtaggttacagaaatctggaagccagatctgtaacttcagggtaaggactggctctcagggctgatcccccgggctgggtgtcccagaggcacccgcccccgccccttccccaaggcaggccaggacaccttcactcctctccttaggctccccacccccttctcctccccactgtgcctcctggagtagcggtggcggtgccacaggggagcggggcggggcgggctctgagggcaagggggatgggccccgccggggtcactggcggccaccctggaaactcgacgcaggccggcccttctagtgaatcgtcccagccacagctggcctcccagccgcgcttggggcgcctcggggcgcgaatggtgcaggttggggagactcaccacgcaccgtcgggggtcggtccggttattcctcaccgctcggctccagtgggcgcgcgggcctctcctcctcagttcctgcgctgcagtccctccctcacccttcgcagcttgggaatccaactgtgtcattccgacggagcgccgtgaggacctccgagggtgttagcgccaagtgatctctgtccagcgctctgaatatccaagtaaaggagttcaatgaagggcgggtcaacggaggagaaaccgtgactctctcaagggagcccaaggcctccttgtctaattagtgacgcgccaatggatggaggctcttcccaccatctcttcccagcatccagtgacaccaccgccaagggacgggctcggcggaacctgcaggaaagaagcatcggctgagcctgactgcagcgctgtgaagagacaggggaggggatcagtagttggtcccgcgcccaccccctgtttccgcgaggggcggagttgactggccatgcaggcagagggcgaaatgtgaaattccactactcctaccgtttttccctgacccgatggggcggagtgtcgtcaggctaagttccctggcggtaaggtggggagattgaggcgcacacctgccgaacggtaacgcaggattagctaaggcgagctcaggacagaagcctcccgaggagcaggagggcaaaataataaataaataaataaataataaataactcactccttggtctttatttgcggcaggaattcagaaggtgaaagcggggccttaggatctttctgaccttttgggttttaagcaggaggtgtcagaaatgttaccacagggctagctggcttgtggccagcaagcgttcacaatgccctcgatttttcatccctctctgtgggttctttttttcattgtaaggcagaatttctacgattgctcacccactcagagaacctgagctggtttagaccaggtgagacaggctaggtttaccctggtgatgatgtgttgttgccatggcgatcctgcccagtaccagaggccctgcagattcagatgcttggtgcctgtgcttggctgaggggccaatgggtgaagctgccatctgcgggatgatgactgaagcctctaagtcagaatccgcccaggctgagccttagggcagctccatggagcctcggctggcctgggatagagagtccaccactgtgccagcccccagccactgcctaggtcctgtgctgagagccccttgtccagggaaatggcgtccagtggaaaagggaccacccccttgcccttcactcaaggcaggttggtgacaaccctgaagctaatccgttcctagaggagctgcttctgggtccgagttttctctgcagcagagcagctccctggatgggatctgttcaaagtccgcctttcacgcggaattttccgtccttgcaattttccacctccaccactaggggatcctctctgaccgcctcatgccggctctggcctctgagcaggggtttctcttctgcatgtgcgaccttgcgcatgcctagtggccttttgggacctagagctgctccacaccccgatggggttacagagtgcctcgcctccactccaccccaccagggttccttccctggctgggatgggatttcagaagcgccgaggaacagcccagacaggtgtgggagagtagccaaggcccctgtcccggggtggccaggacagcggtggcctcgcataggacctggctgggctgctgcaatcagtgtcctgccccttggagagcaacagtgaaaacaacaagactatcttcacccaccttaagaaagaacagaaccagtatccccaactctgctgtgtatcccaacccaattccattccccaccccactctcagtagccaatatgcaaaatattagaatactcttactgttattattttcaaccacactctgcatcctgaaaaaccatatatttcgttatgtgcttttaaacttcttgaaaatgaaatactgaggctgggcgcagtggctgacacctgtaatcccagcacttcgggaggcggaggcaggcggatcacgaggtcaggagatcgagaccatcctggctaacacagtgaaaccccatctctactaaaaatacaaaaaattagccgggcgtggtggcgggcgcctgtagtcccagctacttgggaggctgaggcaggagaacggcgtgaacccgggaggtggagcttgcactgagccgagatcgcgccactgcactccagcctgggcgacagcgccagactctgtctccaaaaaaaaaaagaaaaaagaaatactgaattttcaaatacttgctttttttttcggtcaaaattatgttctcaaatttcactcctgtagatgtgcgtggctggctgtagtttttgcatttttattattaggtattctcctgttgcattaatatgccacattttatttctctcatgtttttggtgaccacttggggtgttttttggttttgtatttttgctgtatacatgctgccatggtggacatacctctttatacatatttcctgttgtatgcagacacaattttaggatgtgacatcttcagcttttctattgtgtcgtgtgtcttttccttcgtgctttgtgttatttacatattctggacacagattctttgtcaactgtatgtgctgcacatctctttcccagtttgtgtcttcttcttcttttttttttcttaaaaaaaactttctttatagtgttttttttttctttctttctttgttttgttttgtttttttgagatggagtcttgctctgtcacctaggctgaagtgcactggccgatctcggctcactgcaacctccgtctcctgggttcaagtgattctcctgcctcagcttcccaagtagctgggattacaggtgcctgtcaccacacccagctaatttttgtatttttagtacagatggggtttcaccatgtttgtcaggctggtctcgaactcctgacctcaggtgatccaccctctttggcctcccaaagtgttgggattacaggcgtgagccacagcacctggcctgtgttctttcttaagtagatgttacttttaatataatagaatgtatcatattttgcttttatattagtactttttctatctaattcaaacacatccccaagggtctttgtgtgtagactgaccaatttctcaagaatcatgaatgaatactgcttctctttccccaatttatctgtaatgctacctttattataaagtttctatgcatgtgtagaaatagttcctgatttttcactctgtgccaccagcataccaatagcacgctgtcttaaatattaaatagcagagctttatgagacaacttgatgtgcagtaggcaattgcccccttgttactcttcttcagggttctttgttgtaccacatgaattttagaattggcttgtccagctaaaagacaactgcaaggattttatttggaagttcataattctatacataatttggggaaagtattttcataataccaagtcttcctattaatgaacacagactctctctctctctcccccacccccacctgtttagttatttatatctttatggtctgttagttattgtttattgtctttcaaccaggtttcatgtttttctacatagaggccttgcatgtgaaagtctttcttcctagcttgctattacaaattttttttaattgcactttttgggtacagtggcttgtactgtaatccccgatacctgggaggctgaggcagatggattgcttgagtccagaagttcaagaccagcctgggcaacataatgaggtccctgtctcaaaaagtttgttttaaaaattgcatttgctgttattcaacaaatgtcattgtgtctcatatatggatttttatatctgataaccttgttcaacaatcttttgattctaacaatatatcagattcttttgagttttccatatagacaataatgtcatctgtaaattataattgtttcttctttgttatttcttggaccttttattttatatttttgtcttgctgcaaggcaatatccctctatatattgtggggtcttttttctcataaagtggggatggtgaacacccttgtcttgctctctgattgtataaagcatgctttctgtagcattttgtagacgctcttttttagattgaggtaattcacttttatttctggtttactgagtttttagcataaattcaggctgaatttgagctaaagctttttctggagacatcatttgaaaaattcatatgatttactttctttaagtcaccaaagttatgatttacattgaactgagtttctactgtttaactgtattcttgggagaaaacccacttgtcactgaacaatatctgttttatttactgctgtcttgtgtctaaattttcttttaggattttttgtatatgctcagattagcctgttattctcctttctgtatttttttctggtttgggggtcaaagttataatagcctcacaataagagctaagaaaccagccctaatggaggccggggcaggaggtttggagttcaagaccagtctgggcaaaatagtgagacccccatctctatgaaaaatagaaattagccaggcatggcagtgagtacctgtagtcctaggtacttgggagggtgaggcaggaggattgcttgagcctaggaatttgaggctgcagcgaactatgattgtgccactgtactccagcctggatgacagagcgagaccctgtctcaaaagaaaaaaaaagaagaaataaaaaggaaaagataaaagagctaagcatctgtttccttttttccattttctgggagagtatgtgtaagactgtaattaactgtttcttgaataatgggagaactctgtaaaataatctggctttggtgttacctgtattggaaggatgaaaaataccaattcagtttcattattggttgatagggctactcatgctttttgttttgttttgttttgttttgtttttgagaggaagtctctctgtattgccctgttgtccaggctgagatgcaacgttgttcacaggcctgatcctggctcactacagcttctaacttccgatctcaatagatcctcccgcctcagccttcccagtagctaggactacaagcatgcagcatcacatccagcctcttttcctgcctgacccagttctggtttcctttagttttctaggtgttcatccattttatctaatgtttaatgcatttggcataagggtgctcagtgtcctttcattgtctgttgtctgtaactgttgccattttcattcctatttatgagtactggcgtcttctctcactttttcttaataatcctgctggaactttgctttttaaagaacatcttttgacttgttgattcttttttcatacatattaactattttcttattttttgcctttatatttatttcttttcctgtttgaaacattgctcttttcttactataaaaatgggtaagtagctcatgaattaccacctcttttaaaaatcttttctactgtaagcattttagcagtttacatttgcccacaagtaccacttcagctacaccctatgtgcttttacataaagtcttcatttttggtaagacatattctcaaattttaattatcacttgtttttaaatccatgatgttttatttgaaatgttgtttctaaagatacattttctggttatacttttattcttctaatttagcacagtggccacaaaacatggtctgtgcagtgcatacaatcgatgagtaatttctgagctgtagtatttggcataatatatggcaaaatttcctaagttttccatgtgtgctttaaaaaacttccagtaaaatacataaatctgttagatcaagcttctcacattgttcaaatagtctatatgtttactgattcatttgactgcttgatttatcaattacaggtaggaatgtattcaaatctcctattaaagtgtgacactcaagtggctttttaaagacagagatgccaaaccaatgaatacatgattttccccaaagcctgcacaaattctctaatgaaattttaccatgaaagtttgtttaattaaggcttactaaagcagtatgttgtcttttactttttaaacagagaatatatattttaatacatcgtttaagtttatgattaattatctattactgaggataagaatctttgcctgtgctcattcagcatttgcacttcatttatgatctgccttctcatagcttctgttaatttttatactagagacatttatttgtttgtataaatgttgaaggtttttttttgttgttgttgtttttgagtcagagcctcgctctgtcacccaggctggagtgcagtggcatgatctcggctcactgcagcctccatctcctgggttaaagtgattctcctgcctcagcctccagagtagctgggactacaggcatgtgccaccaagcaaggctaatattttgtatttttagtagagatggggtttcgtcctgttagccagggtggtctcgatctcctgacctcatgatctacctgcctcggcctcccaaagtgctaggattacaggtgtgagccaccgtgcccagctgggttttttatattataaggagatgtaatagatagatagatgtttcaaagatagtcaaatgtttttaaaatttaaaacacttttttacaggttgactttcaccatttaatttcatctatgtgttttgccttagagaaattttaaatgctatgtagatctcatgacttataattatgaagcattttgttttctgttttccacgaaacttagcttaactttgagcatataatagttgtaaaggtaggagagtaacactgaaaaaaggaattgcataaaaatggcacattttctgtagagttgtttatcgcctgaaaataggccccatttcatggaagtaagatgatcaggctcaggtccccagacgaaactcttggcatggtttttggagatagtccagggctcagtactggctctatcatttgctacttctcccaaagtaaccaatatctcatccaccctgagcccatttccatatctctaacatgaggataatagcatctaccttacacaccaagtagagggatcaaatgtaggaactaaatcaaagtaccagcactgaataacctacatcctcccacttcccaaaaggaagagagatgtatcccctgttgacaaacgagaccattttgcaggagagaaaggaaatgccagttcacttgcaatgtaaacatgctctctctttttagggatgtccagggacctgagagagaacccatgcttaccaaagagtttctagttccagacacacaggactcgaagggtgacaagtatggttttcagggtccctgaatccacccagtcctcacagaaactcctaaaagctgtcgattgacagcgttgagttcacagctctggtcctcacatgctgatactgcttgtgatatcgaacccgacaggaccccacatcacaattgatttaccaactacaatataatacctcctgaatctccaaattggctcacccaggaacaaaggcttggggtaaaactggattaggagatataagctctgaattttctgagggtgagacacacaaggattctaagtgacacgccacagagtaacgggtctgtgactggaggacccacagatttgtcttactggagacaccacatgcacacaaactccatccttagctgtggaaacaagggtcttttgctatcttagccgaattctgggagtaatttttggaggggaggagatctttgggattgcctctttcaggccctttacaaaaatacctacttcttaaatggtaaagcttacactaaactgaaaaaattacatccttggctttttatgaagtaggtgttggattgaatcactactggaagaagtatggcatcgcaaattctaagcagtggtcaaaggatggatctgttaaattagaaaaatctctaaatttataaaaagattttagattcctttattctaaacaattgacctatttgtactcatgggacaatcaaatttcaaaggagatatgtaacgatttcatggcttgcattaaaaatccttctgataaaattaaagataaaaaatctgaccccctgccaaaaaaatcttttgaagttcatactgcctgctttcaatattctgtgggattcacaatgaaaggtgccttatattgtggcctagcttcaagtttatgccttcgccaccatggcctgggttcaattcccagtcagggccccagcgcctttggtttaatgtttgcgtggcatttgacttttttacctatttagtattggtgagattacctttggtaaaaaaaagtttaaagagtggaaatcgcaattctttgtgttggctaaaatctgattataagagatctggaaggttttatttttctttttcaaagagctctatggtcagaagtcggcttcatgaaaagctaatatttaattatatgtacatacagtctttctggattttctcttttgcctcctgttttgaaaaatatttggatttgagtgaaactccgttttagaaattaattgcttggtacaatatacccatgtaactaccctgcacatgtaccccctgaatctataataagagttgaaattttgacaaaataaaattagattttgaattaaaacaaataggtgcttggttcctctgctcacttctttttaaaaggaattcctctcccatgtacttcttcttttcccttctttaccttccttttggcatctttggtatcacatgaagggatctagagggaattttaagtgactctgaaattccttgagaaatacacaaaaagatcccactcaccccttttgggggtctcctgttctccttgtggagtccagagtcagggacaggctcctccaggtctgcagctctgctctcttttatttcatcttggctgattgctttggttttgtgagtaccaggcattactttgtactgtgagagacacgtcctttgtgagtgcaacggctgctgggtcactggtgagggctgcagtttggagatggctgagagccgttgcaataaatggttgtgattgcagggggctccttgtttctttgcaagtttagatgagaaaggtgcagtttggacacagtttaaaggctgtgaaaacaccaccaatgaatatgatttcctttggggatggtctgattaaaagtgggctgattgttgctgtgctactagccttgaagacatgtttctacagcattgtgcagtgtggaaaaattgtgtggcttggtcttgtggcatgtcccttcttttagagacctcagattcaatgtgaaattcgggatttttgattttcaaagatctagatgccctgccttccagatgtgcctactcttcacatattttaaaattagatcctataaactgcaaatactttgttggcttctgtgagatcagaggtccagttagaaaaggaagacagtttgttaaaattaaaaactatttatctaatctaactagattggcctccaaatatgactttctgacattcagctggttactctgaaaagatttctaaatctcttgaggctcatctatatgtttccttgcaaagaaaaaaaaaaaaaaaaaaaagcaagcccaagcactagtaagaaaaagatttgcaatgtttcatgaaaggagtagatgagtgaagcatttatttgtagatactgggttggatacctgtgcaaagaagaagaggtcaataataaaaattgccaggggatttcttggaacttaacaagctgaattaaatatagaaatgtcaggaaatcaaggcaggaaatactcacttgtggttaggcagacagggcagggttctgagcttgagatggagcaaacagttgtggtgggtgaagttcacatgctttagagctcagctgtcctagtaaagaagcctaagagtctctaaagctcttatgagaagatggattttttttgcctagattaaaaggttaaagaattgctttaagttggataaaataaagctaaatgtttaagcaagttgtgaaaggtttatgaaaaaattaattaaaatatttttgtgtgtaaacatattgactaaagttgaaggggtataattcagcatttctgtaaattgagcattgaaataaaaacacaatgggtttctcttagagcactaacctgctctttaacaaaaattgtaaagggttatagaaagtctataaaaatgttaccttatggtcaaacattaaaattgggtaaatatgtctatcaggttttattaagaattaggtttaacattaatagtacactaatgtaaaggtgaaatttggcttatttggtacaaaaatcatacaggaagcattgtgaaatataaaatgatttttagctttctttgggctatatttctataaatatgttattgatgagggttccaaagttatgggagactcctataattctgctatatctcagtgtacattatcagtcataattataattgtcatgttaaattattgtgggccacagaggtaacagatttccttgtcaattgtgtctttgactatgactaccctaaaacgttcagtcacccatatacacatgttaccttgttttggccctctttagaaggtaattttataatcagctataaagccctaacaggtgctcttaaatgcaaattttgataactttggagattgtgacatcagaagagaggaaaaatgttcgggacacttggagagctaaaatgttcattgatatcaagcaggacaggaattaactgcatgaagtgaactaataggaggctgaagtgatctttttgactttttgcttaaaacgttgctgatcctttgttttgcttttcagagtcaaggcaaattttcttttgagctattgacagcttttaacgattaatcaaaatatactcctatgaacaccatttggagcattatttgtttctctctacccgatttccccagaatttggaaactatttgtgggtattcttaatttatggcaatatagttatttgcataagtgcaataagaatgtgttttctttggtaacaggacacaatttgaaaaactggttattttaccaaggttttgaccagaatgctgtgctttcctttaaggaatcaaacttgacttgtggagctaataaagcctttggaaaactgaccttatatcctgtgaacacagtccctgtacagggttactgatctgtgggaagaaaagaatgtcacattctgacaggtcaggaatcccaagttatcttgaaacttcaagaggacaggaattcacccaaccatatgtatttgatggtagaaatccatggcaggggctcagctttaaaaagtcttatctcagattccttctataaaacaaagtcccattaaaaccaattttaaaagcctatgtgaaaaataattattcttgctgcacctcgtacaaataaagtggcaaagcataataaagcaaattggtcctgtcgtaatttgtctttagtaaaaacgggaaactggggtcgggtgcagtggctcactcctgtaatcccagcactttgggaggctgaggtgggcagatcatctgaggtcaggagttcaagaccagcctggccaacatggtgaaaccccatctctacaaaaatacaaaaatgagccgggcatgatggcgggtgcctgtaatcccagctactcaaggggctgaggcagggaagcggaggttacagtgagtcaagatcgtgccacttcacgacagcctgggtgacagagcaagactccatctcaacaacaacaacaaaaaagggtaactggagagagggaagttatgtttcaaaaacttttggaaactatagtacacctgtttttaaattctagtctggcattcagtttttattattttctacagtttgggttaaattcgtatttctctggctacaagtctcctaaataatcttttcatttgtttcctttttctttccctttttccccatttttcttaattggaaatcactgaaacctaagctgtgctttcttaaagccctgtgaactgaagactagacaaccgaaacttctgaaggaagtagcagcaacctatttatatgtgttgctgttgcctactattatgttttagcaggtgctgcctctacacccccgaaacagagagtgctactgggaacaaatcgactttttccactccagtgctgcattcggtgccccataacgatgaccccctctcagcaggaagtagccagaaagattacaatgctccatctccctatgattcttgtgataaataaatatacaagcatgatagaaatcatgcgcaaattgacagtggggattgtggcaggccagatttcactaatggaggtccccatcacaactacttcagtactgactgagtggttaagttcagtatcaaaagctgaaagtgccagcgcctttctacaaaggctagaatgtaacaaaagcccaccaagggttttacctaggcctttcctgggccttacagcatgacaaaacaaagaaggaattcttaaccagacctgtttaggattaaacaaatttaattgggggtctgaagaaactcgccaggcctccacaaacaagttcattgggggtctaaaggaaccccccccaaacctctgtgattgagcaggagacaaggtcagggtaattgccccagcacctggactcatttagatttaagtaaatgtactgaggctccagagaaaggtctccaagacttagactagagttacagattaaaagaagttaatcacttatatctttagataaatgcacactgacacgtagacatacatcttagaaaatatataagctctggaaaaccttgtaatttacagttggtctggagatattttctgggccttctctctgtaaccggttccagaaataaaaaactctcttcctccccagtttatctgcatctcgttattgggccgtgagaaatagcagccagaccctgagtttggtctgggaacacactggctgggcttcctgcctggcggtagagcttcactgtcctccttcccagccaaaatgtggcccttgaaggcttcctccccaactgaccggttttgggttctaggtactcagggaacaccgtcttcaaggaggccattttcatactgttcctggtttgatttttctgaaattaggaaatgccccttgaggcatccaggattgtctttatttcccctgaagcttcccctcctgaagaaaaaagttctcaaacaccctcaggactcaaaccccaagttcaccctgtgaaacattcccatttcctaaacccaggcaggctcatggccctcagcctctcagaccccatggaaacctcctcccccacttcacgggttctctccatattgagagcctcccctcctcggcacacaacccagagactcaccccaacatgtgtagcaaatcaccctggaaacaatcatggctgaacgtggtagcccatgcctgtaatcccagcactttgggaggcccaggaggtggatcacctgaggtcgggagttcgagaccagcgaggccaacatggtgaaacctcgactctactaaaaatacaaagttcactgggcattgtggtgtgtacctgtaatctcaactactcaggaggctgaggcaggagaatcacttaaacctgggagacagagattgcagagagccaagatcgcaccattacactccagcctgggcaagaagagtgaaactacatctaaaaaaaaaaaaaaaaaaaggaaaaggaaaagaaaaaaaaaatcatgaggcaacattgcatttaacaatattttatttatcaaaagacacttgtctttctcaggtaagtgaaggtctagagatgaaacgagtcccgatgtaaattgccccatgggcattgctgagatcacaagatcatcactgcagcatgcagcacaatagtaaatttctcaggatggaagttcaacaatccaaaaggtagtattttttttcatgatgctcagtccatcatacgaaataaaaataaattccttttcatgatcatccattcagtagaaaaaatgatagtaaatttgttctcatgaagatttttaccgtaacatataggatttatcgttattattattattctttgttttttgtttttttgaagcggagtctcactctgttacccagtctggagtgcagtcgtgcgatctgggcacactattaacctccacctccagggttcaagcatttctcctgcctcagcttcccgagtagctgggattacaggcatgcgccaccacacccggctaattttcgtatttttactagagatggggtttcaccgcattggtcgagctggatttgagctccggacctcgggtcatccgcccatctcagcctcccaaagtgctgggattacaggcgtgagccaccgcgcccggcctcaatttatcattattcacgcatccacaaactgggttcttatattttgtacgtgattttttccattgaggagagatatctgtgcatattcatgctgctcatatttcatccacaaactcggttcatatttcatccacaaacataattttttccgttgagaagagatacttgtacatatttatgctgttcaaattcacatttcatcattcttttacaagaaatagataatgtattttaaggttttccagtggtattacagatattttactgggtgtatagatagaaattaaaccaaacttctttgttctggccgccagtcatgcatcctgttttcaacatagttcacatacaactggttgtgtaaaaatgaaattattttgtttagtacaatcatcaacagttggttgattagatttttaattatcaagttaatcattgtcattatgcttctcatcgcactcgtcattaattgctgtgggaggaaatttgttatgttccctatgagagggtgtatcacaaattcaaataagaattcaacgacaatggactgtataaaggaaataagcaagtccatggaaaacatatttttttccggaaaggattaaaatatttttaaaaaggaattaaaaaaaaattgggcacggtggcaaatgcctagagtcccagctgctcaggagatggagacagaaggattgcttgagcccaggaataagttggaggctgtagtgaacagtgattccaccactgtactccagccagggcaatagagggaaaccctctttctaaaaagacaaaaagaaacaaaacaaaacaaaaaaacaccacatcaaaaaacccaacaacaaaatgaaaaaccaaataacagcaatacaattggagctattcgatccaaagaagtaaatgaaacataaagcaaataaaagagaaaagctaatacctgtgtcctgcaggactcagtccaagttctgctctgactccctcctggtgagccaccccttaaaaagtcacttggggcggggttactttgacagacagtcttctgtcaaagagggaggcggtaaatagcacttttttttttttaatttaacgcctttccaacaaattagcggctatgttgtctaagagtgcaaatgtcagaggtgggtacaggcagcaagaccctccccacaggggcagcagaaggaggaatgactaagggaacaagactttagtgtgctcaactacacaggacaggaaacagatgctttttacaaaagctggtggacttgaaggcagaatattttcaagttcctgtaactgcgaactatgacctgtagcctgtgagagtgactttctgtggcaaaggagcttttgtgaatgtgaggaagttaattatcttaacagtgggaggttctcccggcttatctagctagaccctcgtgaaatcccaagtgtccttaggaaggggaagcagagagagatttgagtccagaagaggaagaaggtgatgtgaggcccagtaggggaacaaagggcgatggcatgtaaacacttagcccccagaagtgggagagggctggggttcatcacaccagaatccctaacaatcagccttattttaattacccttgaaatggaaggaggccttagagagccagaggcttggaggggcaccctctgctgcatacacagatcccaactgctgtgggctccaaataattgcaccagggaaatcacaaattatcaaaaataaaggatgtaaagcttttaaaaaatattaaaagcccaacaaataaaaaaagttctaaatctataaaattgacctcagtctgtatatttagatgagtcatgtgtatatagcgtttcacttcaaaatatatgataaatctctcattcattggcttaaaaataaacacttcaatcaagtctttatcagaaaaattgaaacgttaactcaattgccttttagttcatgtgactttacaaaacttaaaacaataaagtcagttttaaaaattattagtaaagtaaaagaaaaatatcttcacaatgtagacattttgtccacatgagacatgtgaaatattgccattactaaatatttgcaggtcaaaaactgtttccaaaacattttaaataatcatctggcctgtctgttttagagcattcaattctagctgaggtctggggacatgtgaaaggagccacggcccgactccgtgctgggaagagtcagacattttccacagctctgtcctttgctgtgggctctgcaactcctaccaattaaaattgcttacgtttttgttttatttttactaaagaggggttcctaaaagctaacattatactgagtatatgtaactaaaactactaagaaaacaatttcacaattatacaaatgtgccaagtaaatgaaaaaataaactgtattttaataaaggttataaaaagaaaaacatatagtggtgtgaggactgtctcaggtcttcactgagcaagggatcatgacattctatggcggacagctgaccttggctttctgctcctcttgattatgtctactaagtgacatacttactctttttccacctgtcttgcctctaagggtaacaggttttatgagatccctcctagtgctttgcaggtcagcctccctttgctgcattccaattttactgcctataccctccagctggcttttgatgacaaaagtcctggtcccagccattctcagattctgtcatccccgtgggcactatggagctcagcactatgggaggttccccaaaaatctcgttttctatgaggaatggccaccacctgcatctcagtgatgctagtgacccctttcctactcctgtgctcactggtcctcatgaagatcctggttggtctgtagccccctatttttcctattaaagagaaattacagtaagacccatttgtgtgcaaaatcaattttaggcttattacacttggcctgataatttgcataaaatgcagcaagaattcatcggccatataggctacttttgagttaattttcctgggtttttacctaaaaatatactattttggttagagtcttgtgaaaataaccaatgtgttcaattgttttattttaaaaggctcttactgaacactataaatatgtataagttgaatatacaaactatattgtcataaaatcacaacccaaaatgtggagaacgcagagggaaaggtaaatttgctcgcaaaaacatacttcacccaaataactggaaaaaaaaaaagactttcatgacccttctttaaccagagcagcagctttcaaacaaggtgtttgccttggaaatgccattcacaagccaaacggcccttgagagctgtctgtcaggcactgtagaatctagcagctcctcacagagttagaaatagtttcaggaaagagattccctgcttttagtaactgcactttatattcccagatagcgagattgtatgtaaaccatttttatcttattctggaactcttttgggtactttttttttttttttttaaatgatggagtctggctctgttgctcaggctggggtgtagtggtgcgatttcagggtatgagaaaatgcagctggacctggctctttccaggaagaccctcacagccaaggagtccaaagcctggggttttcatctaattccagtgtgactggggtaggagcagctttggtgctgggtgtgtgtgtgtgtgtgtgtgtgtgtgtgtgtgtctatgcctgtgtctgtttagggtgttaggctcgtggttgtctagatacaaatgtcccagggctcaggagccccagggttatgtcaggggcaccagatgaaggtgtcaacagaagttagggcacaagggacaaaggtgagagcaaggttagattcatttaggtgcaagaaatcatagagggaggagggagaggaagccctcctgctaccaccgaggaagaagcgcagcttaaggcagaaagcctgtccggagaggaagtgagtttgagggcagggctctctgggtaaagtacggtctgggacaccagcctgggggaagggtacagaatgcagagtggcctggcgtggggactaagaacagaggagagcagctttcactgggagggtcagtgttttcagtgtccagcactgagcaaggtgagatttgggcagcttgctgtgaaataaggtcaggctctggcattgtccccattgcgtgtgtgtgtgaggggcactttgggagagtgaactctccacctccatcctctcatacgtccttcaaccgagcttgccagttaccctgattccaaggagatctatttattgttgacaatactggatcctagcagaggctgggtaggagcctgggcacaagcaagtggaggagggggcctgggcctgaaagacctgggaggtttgagagaggacacagcccacagaatggagcagatggggtagagtcggcaagcattcagggctcctagtaagttggacaatggagaccctgaaagatccagtaaaacggggagaacaaacaggtccccaactcacatccttgcagtgcctggagcttcagactccagacaggtggggaaggaaaattgagggatgtgaacatgttggagaatgtcgtgccctgaagaatgaagaaaaggggggtgaggaatgagagcaggaacggcttccagtgcctggtgcccaggagaactcagaaaatgggtgtggtggagaggaatcgaggaaccggaagtggtggaagtgtgcagggcccctccgagatcactgtgactgccaggcgtcctccctggctggagagcttcactgtcctccttcccagccaaaatgtgtcccttgaaagcttcctccccaatggactggttctgggtcctatatatttgaaggggtggcctgcctctccacacctgtgggtatttctagttgggtgggaggagagacagagaaaagaaataagacacagagacaaagtataaagaaacaacagtgggtccaggggaccagcactcagcacaccaagggcctgcaccggcaccggcctctgagtttcctcagtttttattgattattattttcattatttcagcaaaaaggaatgtagtaggagagcagggtgataataaggagaaggtcaatgaaaaacatgtgagcaaaagaatctatatcataattaagttcaagggaaagtactatgcctggacgtgcactcaggccagatttatgtttctctccacccaaacatctcagtggagtaaagaataacaaggcagtattactgcaaacatgtctcacctcccgccacagggcagcttttctcctatctcagagttgaacaaatgtacaattgggttttacaccgagacattcagttctgaggggcaagcaggagacagtggccttcctccatctcgactgcaagaggctttcctcttttactaatccacctcagcacagaccctttatgggtgttgggctgggggacagtcaggtccttctcatcccatgaggccatatttcagactatcacatggggagaaaccttggacaataccccgctttcaagggcagaggtccctgcggctttccacagtgtattgtgcccctggtttattgagactagagaatggcaatgacctttaccaagtatactgcttgtaaatattttgttaacaaggcacatcctgcacagccctaggtcccttaaaccttgatttcatacaacacatgtttttgtgagctccaagttgggtcaaagtggctgggtcaaagtggctggggcaaagctacaaattaacaacatctcagcaaagccattgttcaaagtacaggtctttttcaaaatggagtctcttatgtctttcctttctacatggacacagtgacagtctgatctctctttcctttccctacatatattcatggaccacagtcttcaaggagtccatttcctcactgtttttggtttgatttctctgaaattaggaaatgccccattgaggcacccaggattgtctttacttcccccagagcttccactcctgaggcaggagcttctcaaacaccccccaagactcaacacctaatttcaccctctgaaaccttcccatttcttaaatccaggcagggtcatggtccttagcccctcagatgctgtggagaccttctttccctttcatacattctctcaagattaaaagccacccctcctcagcacacaccccagagactcaccccaacatgcattgcaaatcaccctggaaacagtcataagaccacactcatttaataatattttatttatcaaaagacactctttctcaggtaagtgaagttctggagaggaaaagaggagtcctgatgtaaattgccctgcaggccttgctgagatcacaaggagattgttactgcagcttgtagcacaatagtaaatttcttctctggatggaagttcaacaatccagatcgtagtatattccttttcattatgctcagtccagcaaatgtgatgataacaaattccttttcatgatcatccattcagcagagaaaatgtttgtaaatgtgttttcatgaagatgtttaccataacatacaggatttaccattatcaatgcatccacaaactctgctgttgttttttatacataattttttccatcgagaagtgatagttgtacatattcatgctgttcatatttcaaccacaaactctgctggtttttttatacgtaattttttccattgagaagtgatacttgtacatatttgtgctgttcatatttcatgtttcatcatccttttacaataaataggttatattgtattttaagtttttctaactgtagtgcagaaattgtactgggtgtatacatagatatcaaaccaaatttacttgttctggctgataatgcatcatttatttcatagattatgtatttctttgacacatttcacgtacaactaattgcataaaaatgaattttcttttagtatagacatcagcatgtgcttaattcggaatttaattgttgagttaaacatcgtcattgccttttccgttgttattaattgctctggtgggaattttgttatctcatacataagacagtgtgccacaatatctcttaaaatttcaatggcaataaactttatatttaaaaacagggaatctatggaaaacacatttttttctaaaggattaaaatatttttttaaaataattttctaaaaagttaggcacggtagcaaacgtctagagtcccagctactcaggaggctgagacaggaggattgcttaagcctacgagttgggggctgcagtgaactgtgattgcaccactacattccagccagggcaatagaagttaaccctttttctaaaaaaaaaaaaaaaagaaagaaagaaagaaaaaaagcaacaacaccaaaacctcaccaacaaaatggtaaagaaaaaaaaaacagcaatacaatgtaagctatttgatccaaagaagtcaatgaaatttaaaacaaatgaaagggaaaaagtaatacttgagtcctgcaggactcagtccaagttctgctgtgcctccctcacggtgagccacccctttagaagtcacttgggtcataagttaacccgataggaagtgtcctggccaatgaactagggaggtggtaaatggcaccattttaaatttaaattcacggccttttcaacggatcagtagccatgttgggtaagagtgcaaatgtcagaggtgaaaagaggcagcaggaccctcccctagtgcttgggcaacagaaggtggaatcactaaggggacaagactttagcatgctcaagtacacaggacagaaaacatgctttttacaaaagctggtaaatatgaagagggaacattttcaagttcctgtaaccaagaactaccgcctgtaaccggtgaaagtgactttctatggcaaaagcgtttttgaaaaggtgaggaagttaaatatcttaatgttgggaggttcttctggtttatctggctagaccctaatggaatcccaagtgtccttatggagcggggagcagagagagagatttgagtccagacgaggaagaaggtgatgtgagtctgggtgcgggacagggggagaatgatgctatgtggggatctgggctggggaatgacttagctgcatgagcggagtgacttagactcctgaactagaagaaatctagggctcatcacctcagcagccctaaccatcaaccttatttttattacaggtcttccatcgacggactccctaaaaagccagcggcgtggaggggcgccctctattggacaaatagatcttgactactttcggccctcaaatagcctgactaggcaaataacaaataataataatttttttttaaatcatggaaaatattttaaaaaacaattaaaaagttataaatctataaaatctgcttctgtctgtgtgtctgtatatttagatgtctcatgtgtacataatgtttcactaccaaaatatatgatgaaaccctcattaatcggcttagaaaactaaacacctaaatattttctcagaaaatacaaaaactttaactcaaatcccttttaattcacctgactttaaaaatctttaaaaaataaagcatgctttaaaattattagtaaagtaaaattagaacatcttcagaatttagacatttggtttaaattatacaggtcaaatactgcccttagtaaatattttcaggtcataaacaactcctgtaatcttttaaataattgaattacatgtctgttttagagctttaagttctagctaaagcctggggacaaatgaagggcaccatgccccctctctgtgctggaaagagacattttctacagctctgacccttgcagtaggctttgcaactgctacctatcaaaattgcctacatcctaagtttattattaaaaggagttgcttggagttaacattataatgaatatatgtaactaaaactatttctcatacaaagtatatgaaaaagtagaatgtatttttaataaaaagttataaaaagacatgaacatgtagtttttataaaaaacagtaattttgtctagttttgcagttctaaaaagttatgttaaattcaaaaataaaaaataacaagacaagactcaaggtttaaataagttgtaaaagatttgtaaaaattagttctataaaaattttacaaaaaaaagcattggttaaaatttaaggaattattttgtttttacagaaattaaacattcattaaaaacactctgatacaaggccttaatttgggttcatgtatcagaatagcagggttttcttagaatattaatctattctttaaaagaactatgaatgttatgcaaactttataaaaatcttaccttagagtcaaactgattaaaattccatagattttacgtaaaattttattaaaaattaacttcaacaaaaataaaatttgattttctcctttaaacaaaagttttgcgtaatattaaataataaagcatttttgtttaccttttaaactataaacacacacacacatacacatacaccaacactaaagtcagctgacctcatactgtctttattggatattcttgtttaaaaaactatcttctttggaaaataaagttttttattttaaaccatattttaaattatcattttgactaaatccataacatacagtgatctgtaataattctattttataatatcaagtgttttgaagaactccaggaacagccatgagagaacactgtggtttagtaacactttatttcctcagtttgaaaatagttgtctttcttggggaggccggtttcagcagatgaaaacaagagtcatgatgaaaattacccagcagtggttagtgtgaccataggaacattgtcatcaggtcagcagaaaacatatcagcaaatttttctcatactggcagtgtgtaggggtggatgtttacagttcctgaagccccagtggtcgtgtggtcttttagttttgccatttataggcaacttgtggtaactagctcaattagacacattccttatcacaaggacagagggctttctgtatcctagggttcttgccttggcattccagaagaatcaggtcacacgtggacgtggagaatgagtgcaaggttttattgagtggaagtagctctcagcagatgggggagccagaaaggagattggtttctccctggattggggccgttcagcagccctggctctcctctgactgccccaggcaaaatccacatcgttctataagtcggtgccctgctggtgtgctggtgcctgttgtcatgttcctcttcatgtccagccgcctgtgtgttcctccgctgatgtgctcctctcgacgtcaagcctcctgtgtgtctgactgctagggtcttggggtttttataagcacaggatgggtcttagcaggccaggatgatcttgggaaagacaacattcggtcaggaaaacaaaaatgcctgttgtcatctaggtccgtggggacaagcccaggtgtggagcttttagccagggaccacagcctcctgtatccaacacttcccttcaccttttctatatcattcaaagggatcatgcccttcccatcccagcacttcactttcatgtcatttgccccctctgaagaggtacatctaactgccattagaatatggatgatgaccagtcttagctgcttcctgctgaaagggggcattgttttgggggaaaacggcagtcagattcctcccaggggtctctataataaaagatcgaggtggctactttcaggaggtcctctaatgtactatctggtcccaagtcccatttctgcaacctcctcctgatgtcaggagctgcctgagtaataattttatcctttaggattatctgtccctcgattgaattaggagatagagaggtgtgatttaccaaggcctctcttagcctctccaggaaggcagtgggattttcatcaaatccctggttaattatggacaacttagtataattgagaggcttggtcttagacctacgtaagccctctattatgcacacctgaaagtgtctcctcttccagtcttccatctcattattgggatcccatttagggtccttcactggtgctacttctcttccagttggataatattcgctcccttccctgatgctataggtgatgcaaagctcatccccaaatctctctgctgctggcagagcagcctgcttctcagtgtctatcaggttctgactcaaaagtaacataacgtctctccaggagagttcaaatgttagggtgaaattctggaaagcttctatatatctatcagggtcatctgaacacttgcccagatctcccttaatttgctttaagtcttgtagggaaaagaggacttggaccttactgggcccaaattcactgggcatctgtaggaggggcaagagtgagactgggcttgtttgggatgaagatttctaggaggggccaggtgagaggctgaagctggatacggaggttggggtggacccagaggagcagggcttgagggagctggcacgtcagctgggggtgcgtctgggactcgtgtctttaattccctgggcttgaccctggcagccttccccgagacagcaaacaggagggctggaacaatcctacatgtcagcaaaggtctggattgctttgcaaggtatagaaagcctgcacatttggggcctcagaccatgtgtcctcacatccagagaaaagttctaattgcaggatggtattgaaatgaatggtcccttcctgaagccaagccagtccttcctgtaaaccataatttggccaaacctatgtgcggagggctatgagatgcttttcctctggattctgagggtcaaaacagtcccaatggttcaggatacactcaaggggagtacaagctgggggtggtgaggagaactggctgcccattctgaaagacagggaatagaggtgttcctcatttcccttccttcttttggcaaaaagctcagggtgtgatggggagggaaagcaagcatcttcacttcactttccacctcttacccctgcgccctggcaaccttggcaggtgccggccacaggtacaaatgcggtatgtacccatgaagcagggagaacctggagattaggaattaactgccctcacctatgtttccttttctccctgctgttgaaaaactttgagttccctgggcctttttatcccatgaggcatggcctccttctgtgggatggggttcagtcagcaggaattggtcctgtccatttacattgtgcctgttgcctggctttgaattcctcagacctgctttctctttctagggcctcagcctgaagcttggaattgagtttgggactgaaaaagcatttcagaggctgtttatatccatttagtgcctcaaataagccctgctgaatttgcaattatcagccagcaggggtcactcctctgttaacttccctattagaaacagagcggtggggattctcacttagaaaagaaaaaaagagaaaaacagttaaagaggcaaaaagtggggaatgctgggggaagaaccccttgcttagtgcaagtgggcccctctaatccttataactttcccatccttcccccagttcagaccaggttgaattccttggccatggaaggaaaggttccattgatgcagtgggtgagaagcactctgtagggtcctggctaccatcggttttctcacacccccctcatcccaggcagtggagggagacacttctgcgacattgctccccctgccccttcatggctattgggtgtggcctttgcctgctgcaggcatgcctaggtgctggagctgggagggaaaagggtaaggagaggtgccctggaagccgctcatgcctggggctgtcaaggtggaggcatacatggcacctctaggaaaaattggtctgatttgcacctttggcggctgagccaaatgctcattttacttagtaacattgcctcagcctgtagcaaaactcttaacattataaaggaagagataagatccatttcaaataatgtgtgagagagaaaagagatgaaaggaaaacagagtcttttacctgcaggaaagggagagaagtggcagagttttggaagaaaggcaggcccaacagtttcccattcactcacactcaccttccgagatcccagacgagccaccagttgaaatgggaaaagtttccttgtccccctcacaggaggtggagtgggggtgtggcttgcttctttagtactccgctgctcaaacctctagggaagcatacagactggcaagttgtggggctacaaccccatggcagcatctaggggtagatgtttacagctgctgaagccccagtggacatgtggtaccatgtgctcttttagttttgccatctataggtggctttgtggtaaccagctcaattagacccattccttaacccaaagacagagggctttctgtatcccgcggttgttacctaggtgtaccagaaaaatcaaatcacacgtggtcttggagaatgagtgcaaggttttattgagtggaagtagctctcagcagatgggggagccaaaagggagaatagttttcccctgaagtcgggttattcagcggcccaggctctcctctggctgccccagccaaactctatgtcaatccattggtcggtggcctgccagagtgctggtgcctgttggtggattcctctcagcgtcgagagtttttccctctcaggaaagggagagaagtggcagccacccatgtgttcttgcactgatgtgctcctctcgacgtccaacctcctgtgtgtctgcctgctagggtcccagagtttttttaggcacaggatagggcatggtgggccagggtgatcttgggaaatgcaacatttggtcaggaaaacaaaaatgcctgtcctcatctaggtccaggggcacaagcccaggtttggagccctagccagggaccccggcctcctctacccatcactttccttcaccttttctgtatcattcaaagggaccatgcccttcccttcccagcacttctcttctgtatcaataggtgatgtttttaaaatttcccaactctagtgcaggcatggtactagacatatacatagaaataaaaccacacttattcttctggctggcaagacatagtatttttgccaaattatgtgttgttttgaagcattttatgtacccctggtcatataaaaataaagctattttgttcagtacaaacagcagcattttctggattagaaagttaatcatcttaaaagatcatcacggatttttccattgcactcatcactaattgctttggcaaaaaatttcttatctcacgcatgacaaaatcagccgcagtatctcctagtaatttaatggtgatgatctttataaaggaaataagcacatcaagggaaaacataattttttttaaaaaaagagtaataaaactttttaaaagtcttttttaaaagactgcttttctaaaatagtaaaataaaactccaccaataaaaccaccaacaaaacagaaaagaaaaaataatgatatgatcggagctatttgatgaaagatggtaaattaaatttaaaatgattagaagagaaaaagcaatacctgtctcccgtaggtctcagtccaggttctgctatgcctttctcctggtgagccacctatttaagagtcgcttaaagcatatgttaatccaacaacagcagattaaaaaccaatgcaatctgaactatttgatctaaaaacataaataaaatttaaaacaaataaaagagaaaaagcagtacctgtgtcctgtaggtctcagtccaagatctgctctgactcccttgtggtgagttagccctttagaagtcacttggggtggggcatatgttaattccactaacattggttctggccaatgagtcaggaaggtggtaaatggcaccttttcttcttgctgatttctttcagttcctttggagtctggacattagtcctttgtcagatgcctagtttgtgactactgtttcctatactgtgggttgtgtgtttaccctgctgatatttcttctgccttgcagaagattttcggtttcattaggtcctattgatcttattctatttttatatttttgcgtttgcttttggggcattagtcatgactacttggcctaagccaatgtctagaaaagctttttggatgctatcttgtagcatttttagactttcaggtcttagatggaagtttttatatgctttgttaaagatcaggtgactgaaagtaccgggctttgtttctcggttctctattctgttccattgctctatgtgcctatttttatacttcctgcaccatttattgaataaagtgtcctttccccaattagtgtttttgcatactttgttgaagattagttgtctgtaagcatttggctttatttctgggttctctattctgttccattgctctatgtgcctatttttatacttcctgcaccatttattgaataaagtatcctttccccaattaatgtttttgtgtactttgttgaagattagttgtctgtaagcatttggctttatttctgggttctctattctgttctattgctctatgtgcatattttataccagtatcatgctattttggtgattgtagccttgtagtataatttaaagcctgccttcagatttgttctttttgcaaagtattgctttggatatgcggtcacgtttttggttttgtataaattttaggattcttttttctagttctgggaaggagaatgatgatattttgatgagaattctactgctctgtagatggctttggagagtatggtcactttcacaatattgattctacctattcataagcttataatgtgttcccatttgtttgtgtcaactgtgatttctttcagcactattttgtagttttccttgtaggaaacttacattaacctacttggttaagtatatttctaagtattttacttattaaaaattctcagggaaatgcaaagtaaaactgaggtgggaaattaaagaaaaataaaattaaaaagaaagggaaataagctttcttgtattaagctaacttgtcccagaggcagcaacaggcacagcccagacccaggaaaagtcttgataatattatttattgtattctggagactcttccagcactccttcaatgtagggagaagaaaaacaaattttcctttgttttatggtatgagtttatagattcttgttctctttaactagtaacttcaagtattctgttttatctaagaagtatggcaaaggtcatgagaagcctgagcaggcctgaactacagctctctaggcaccatagtgaagataaaccaatgcaagcctctttagagcaaaacctagataatagacatctgggttgcatagcaacagttatgtgcaatcctgagttatgaacctgttacaatttgattaactgtctttttcctgcctctgtatccctgctttcacaccactgtaagcttgcttcaagctggcccacccccttttgtgaagtgtgtataaaagtcaagtgctgtctttgttccaggccctgtctttggacgtgagtctgctgggcctgagagcactcaataaaagattctcctgttttaacccaaagcctctctctcatcctcctaaatcccacaacaaaaccacaatgagatgctatcttaatcttgctagaagcccataatttaaaagtcagaaaacaatagatgttggcatagatgtggtcaaaagggagcactttgacactgctagtgggaatttaaactagtccgaccactatggtaaacagtatggggattccttaaagaactaaaagtagaccattcattccagcaatcccattactggctatctacccaaaggaaaagaagttattccataaaaaagacacaagaatatggatgtttatagcagccgattcgcaattgcagtgatatgggaccaacttaagtgcccatcaacgaacgagtggataaagcaaatgtggtacaccatggaataatacttgataataaaaaggaacaaaataatgtcctttgcaacaagttggatggaactggaagccattattctaagtgaagtaactgaggaatggcaaatcaaatattgaatgttttcacttttaaatgagagttaagctatgagaatgcaaaggcataagaatgatataatggacttggggactcagggggaaaggttgggagggggatgaggaataaatgatgacatattgggtatattatacactgctcaggagacagatgcctcaaaatctcagaaattaccactaaggaacttttatccacataaccaaaaaccacatatattccacacactattgaaagaaacataaacattattttaaaaaataaagccacttttaaaattagcaaaataaaataaatatgtcttcagagtttagatattggatccaaattagacagatcaaatactgcctttactaaatattttcatgtcattaacaacttctaaaacctttcaaacagttttttgacatgtcttggaaccatccatttctagctaaggcctgggcacctgtgaaatagggccatgcccccccttatactgggaagagtaagatatttcaagactaagatgttttctacagctccatctttttctttaagctctacatcaaggacataattaaaattggttgtctcctaagtggtttactaaaaatgcatacttaagagttaccattataattaatatttgtatctaaagctacttaaaaattttcacacacaaatctgactgaacaagtaaaatatattttaagtcaaagtttataaaaggacatgagaacatagcttttatgaaaaaattagttttgtcaagtttagaggttttcaaatattttaaattcaggaaataaaataacaaaaagacaaaagaaaatggttgaacaacttagaaaaggtttgttaaaattcatcttataaaacaatctacatgtaaaaagtgggctaaaatttgaaagagattatttaggttttccataaattaatccagaaggggtaggaagtcttaagaatgaggaaggacaggaggaaggggaggtcatcctgacactgcagaggcagaagtgcagctgaaggtatgaaggctaagaggggaggggagtttgagtgctgctgcctggctgtcagagcagaggagggtcctgggcaccagacttgaggaagggatgaaaatgctgggcagacctgtagtgggcccttgagatggcagatagtggtttccagagagagggccattgttttccagtgcccagcactgagcagagagagttttgggcagtgtaaaaaaaaaaagagaacttacctctttctcgttttagaaaaagaacagtctaagaatatcagcagggaaactctcagtgcttcaaggggttaaacgcccttttggctttcttgtgttggtttcatcatagaggaggagaaacttcttggaagtgttcctaaaaacacaacacgtctgcttctcctttcaaaaaaggaagtgctaaaacacgaacactctagatccaaatattaatacggatgtctaaatgcttccgttttccaaggggcagaaagctaaaggttgtaacctattcatttcagtcaaagttggtgaaagggaagcaaaggaactgggtggggcttggaaggatgacgaagctcaagctcattggccagcaacctctctcctgggggcgggaggggtgagcatacgtcattgctttggcttctataaaatgaggaggactcaccgagtgtgaagagtccttctggtgattgcagctgagagcacactcacgacgttctgcaaggattctctgattatgattctgaagggaaaagcgatggaatggacagcagagattgtaattttctttatcttgaattacggaagaaagtatctaggacagaaatccacgacaagtccttggaaccagcagatctcttcgttcacggagacgttgacgtattctctattgaagaagattcttaccttcttactggacaaggttttgtcagttctgcgtgactggattgtccgggagactctgaggaaactgatgtcacatgtttttccaaagaagatgtttctggaaccaacaactgtgattgtggtttgaggacttctgagagttccagtacaggaaataagcagaacatcagctggaggctaaacggatccagacttcactcttcacttcccttcctattcagtctattgtgcctgctgactgagaagcttggctggtatgtgagcaaataaacggaactattcagaaggagatgttgacatattctgtattgaagaagatccttatcttctcacctgacaaggttttgtcagttctgtgtgactggattgtccggaagactctgaggaaactgatgtcacatgtttttccaaagaagatgtttctggaaccaacaactgtgattgtggtttgaggacgcctgggagttccggtatgcgaaataagcagaacatcagctggcggctgaagggatgcagcctccactcttcacttcccttgccattccatctattgtgtctgcctgactgagaagcttggctggtatgtgaggaaataaacggaattataaacaaggagattgtttctcatctacttcattctgttgtggcttttctattttggggttcagggtgtgtgacaaggaccaaggagatgaaaggtttcatgatggagaaagcccaggcaatcagattgaagagctatccacagggaatcttggctgctgaggggctgcaccctgcaacggactgaccatatgacagaaaagggttttaaaggctcaacttctggactgagaacccagagtaatttgggaacctcctctgtgaggagatatgaaagctgggaatcatgacatccctaggaatggaaggcacatttcctgatggaaggggtgctttggaaaacaggagcagagtagacacagcagccttgtggatacgggtgggcagcatgcatgggtgatgtgaacgtggagtgtttgtgatcgaaactcaaaatgtctgacaaagtgaaaacctagaaaccacaatgaggaggaagagtttgtgagggcaatcactctccccatgtgtgaaaatcgggggctcttaaaatctcatctggagaggtgcagtctaccaaactctgggactttagcctccccttttaaaaaaccgtgcatcaataccaacgtccgaaaccacagaaataacacctggcttgcatggagacaaggacaaaaagccgtcatgatgagttgttctgctcacttgctgcctctgttcagtgcacaggatattgtccacccactagcaggctactgcaagagaagtgtgcaatatgttccctatgtgccatatatgtgccatatggcccatatgacaactgagtcagaaaatatctgatgccctcagagttacactccacctggagcttgcccccagccatccaggacctaggctccctaccctgtccaattttctggtgttttgggggcttcattctctaaggtgtgcccactctttactcaaaccaaaacacccacatattcctgcccatgaacaaccaatcaaccacttctcagttccacatcctgctgttgggtctctagtggtgacactgtaactcccaggtcatagtggtgacactataacacctagctaaattgatgccttgtctctaggaggccatgggctcctgcaggtctcatctgactctctgtagccttccctgacaatgctcacaatacccaagccagagccacattgacagcaagctgctctcatcttacctttgccagacctggccactggaaaaggctgaccctcatcctgcaatgcctatacctccaacctttgtctcaagctggtgtcctggagggacttctaagcagaaaacagattcagactcccatcctctcctgaatggcctcatatccaattctcagaccctcagccttcattgtaaggacacttcatccatgcccttgagtattctgtctgcactgtgtattctgcaatagattctcctccctctgcgaccctcaactccttccgcagactttttgttttcttgatcatctaccatagtcttccactgggacactgccaagcccattctggagagtgagttgtgcaagtacactgccccccatctacctttcgggaggtgtatacacccttctttctcccaggtctggaggctttctattttcatcctgaggcatctccacctgctcttggattcttcaaattgacaaccaccagttaacaagaactatgtgtcaccaaatagccaaacaatggcaattacaaaaataaaattaatagctgtaacccccattagcaaggatacacaaatcaaatcagggatagtgggtgaggaagtctgcctaacattcaaggaaggattctgaagtgatacaaaatcattgcctttgctatctttagaatggacactttcagccaggcacagttgctcagcctgtaatcccagcactctgagagccccagttgggtggatcacttgaggccagcagcttgagaccaccctgggcaatgtgcagaaaccccaactctactaaaaatacaaaaatagccagttattgtggcacatgcctgtaatcccaactccttgggaggctgaggcacaagaatcacttgaatctgggagccagagtttgtaatgagcgaagatcatgccactgcactctagcctaggcattagagtgataatctgtctgtggaaaataaaaacattcctcttcaaagttttcttctttaaatcataaatgttggaattaatatatcctctttgaaactcactttcttcaagcttctttatttgatggtagtaaatctttgttaagctttatgaggcaagagtaatggaagaagcatattatatatatttatactctaacctcagtgcttgttctagcaagctcaggcatgcgtgaatgtgcccaggcatgttccagcccataccttatatcctttccttattgggaaatgctgttactcctataagcattcttgtaagcaacttcctctttttctttgtctccactatctttacctattgaggacagttttaggttcttagccagttggatgtagcatagactgtgaggtccaaccccagccaatggagatagcacacagcagtagcgacctcatgcttaacagataaatattcctgtctccctttgtttggggtgctctcagctgatgagcaacaccctttctaaagaaattaaagttgtcttgctgagaaaacttttggtctaaatgctgattcttccttgcagcactgaagaagaagcaattatttccaacactttctcatacacaaaaaaagaagaaggtggaagaaaactttcttgtgcaccctatccctcactcagaaagacaacagaaggctcctagtggcaagccctagaggattcatttcttttgggaaccctcttggctgggatactaggactcaggtcaaactcagcattttcagtgtgtgggaagtgtgcttgggtttcactgttacttccaataatgtgatttggtccttggggttcaccaaattttggtatggagtggtgaaccctgttaagtttaagtgtctataaaattaacaaagcaaaataaccattctgccccatggttcagagaccaaatattgtgtaggaaatgctttagcgagagaaacagagaagaataaaaaatgtcctcaagcgctgcattatttcttgttatcgtccagatcttagaggaaaggctttcattttccctcattcagtatgatattagctgtgcatctgtcatttatggcttttattatgttggggtatgttccctgtgtatgtagttttttcagggtttttgttatgaagtgatgttgaactttatcaaacgtttttcagtttcagttgaaacgatcatatgctttttgtccttcattctcttgatatgatgcatcatgttgatgatttccatatggtgcactgtccttgcatcctgggcatgaattccacttgatcatgacaaatgaatttttaatgcattcttgaattccgtttgctggtattttgttgaggatttttgcatcaatattcatcagagatattggcctgcagtttctttttttttcttttttctttgttttgttgtttgtttgtttgtttgttttgatgtgtctatgtctggttttggtatctgggtagtagtgttccatccccttttattttttagaataatttgaataagactggtgttggttctttaaatatttggtagaattccgaagtgaagtcattgggccccgggcttttctttagtggaaggctgtttattatggcttcaatctcgttacttattattggtctattcatgttttgaatttgttccttatttaatcttggtaggctgtgtgtatctaggaatttgtccatttcttttagattttcaaatttattggcacataattgcccattgtagcctctaatcgtcatttgagttcctgcagtaccaattataatgtctccttcttcatttttgattgtatttatttggatcctgcccctttttttcttacttaggctgcctaataatttcttaattttgttgaactttttcttttgtttgtctcgctctgccaccaggctggagtgtagtggtgtgatcttggctcactggaacctccgtctcccaggttcaagcaattctcctgcctcaccctcccaaatagctgggactacaggcaagtgccaccactcccagctaatttttgtatttttagtagacacgggttttcaccatgttggccaggatggtctcgatctcttgacttcataatccacctgcctcagcctcccaaagtgctgggattacaggcatgagccactgcgcccagcctaattttgtttaaattttcaagaaatcaacttcttctttcattgatttctgtattttttatttccattttatttatttaaactctaagctttattctatcttcttctcattttagctttggtatgcttattgcctctctagctctttaatgtgcattgttagattgtttatttgaagttcttcctctctacaccataagacgtaagcatgtcctcattatgtcataagatgtaaccacttacagctataaacttccttcttagttctgcttttgctgtatctcataggctttgttatgttgtgtttccattatcaattgtgtcagaaatttttcaatatttttcttaatttcttcattgagcaactgatcatttgggagcatatttttaaacttccatgtacttacatagtttccaaaatacctcttgtgatcaatttctagttttattccactatggttcaagaagatgcttgatattatttcaattttttttcacattttaagatgtgttttgtgacctaacatatggtctactttttttttttattaaactttaagttgtggggtacatgtgtagaccgtgcagttttgttacataggtatacacgtgccatggtggtttgctgctcccattaacctgtcatctacattaggtacttctcataatgctatccctcccctaacctccaccctctgacaggacctggtgtgtgatgttcccctccctgtgtccatgtgatctatttttgagaatgatccatgtggattagaatgctgtggaaaagactttggattcctaatatccagggagggagacgatgatattactttcaatatcacacgggtgtacacactctctgtgacattgttcctaatatccagtggaagagaggatgatataacacccagggagggagaggatgatattactcttaatattgcagggtgtgtacccatgcctatgatattgttcctaatatcaggagggggagaggatgatattactcagaatatggcagggggtgtacacacactctgtgacatggttcttaatatacaggggagaatgggacaatattactctcaatatcgcagggggcgtacaaccctgtgatttgttcctaatatacaaaaggggacagtatgatattgttcctaaaatcgcagaaggtgtacaacgccctgtgatattgttcctaatatccagggcgggagaggatgatattacccccaatatcacagggggtgtgcactttccctgttacattgttcctatgatccgagtggggggaaatgacattagtcccaatatcgcaggatgtgtacactactcccccatgatattgttcctaatatcaagggggagagaggaggatattactcccaatatcgcaagggaggtacatcctccatgcaatattgttcgtaatattcaggaggagagaggaagatattactctcaatatcgcagaaagtggacacccaccctgtgatgttcttcataatatccagggaagcagacgattatatgactttcaatatcgctgggagtgtacatcccttttgggatattgtttctaatatccaggaagggagaggattatattacttccagtattgcagccagtgtacacatttcttgtgatattgttcctaatatccagaaagggaaaggatgatattactcccaatattgcaggtggtgtacacccccctctgatattgttccttacatcaaggaaaagaaagaagaatattactcccaatatcgaagagagtgtacacccctcctgtgatattgtatttaatatccatggggaaagaggatgttgttactcccaatatcgcagggggtttacacccacactgtgatattgttcctaaaatccagtgaaggagaaaataatattgctcccaatattgcagggtgtatacaggccctcccccgttatattgctcctaatatccagcggtggagaggatattactttcaatttttgcagggagtgtgtaccccctctctgatatttttctaatatcaaggatgggaaaggatgccattactcccaatatcgcaggaggtgtacatgccctgtgatattgttcctaatatccagggaggtagaggatgatattactttcaatattgcaggggctgtacaccctctatgatgttgttattaatatttaggttgggagaaaatgatatttttcctaatatcctgggaaggaaaggatgatattactgtaaatattccagggagtgtacaccttcctaatattctaatattgttcctaatatccaggggtgggagaggattatattactcccaatatcgcagtgggtgtacacccctcctgtgatgttgtttctaatatccaagcgaggagaaaatgatatcactctcaataccgcagggggtgtacaccttccccatcatatcgttcctaatattcagagggaaagaagatgatgttactttcaatatcgcaggggttgtacacaacccctgtgatatttctcctaatatccaggaagaaagaggatgatattgctcccattatagcagacggtatacgcctccctgtaacattgtttctaatatcaagactgggagaggatgatatcacttccagtatcgcaaggggtgtacacctcccccgtgatattgttactaatatccagggggaagaggataatattactttcaatattgcaggggctgtacacccccgtgatattgttgttaatatttaggttgggagaaaatgatattagtccaaatatcgcagagagtgtacacacttccgataatattgttcttaatatccatgggggagacgatgatattacacccaatatcgcagggggtgtagtctccccttgtgatattgtccctaatattcagggaagtaaacgatgatgttagtgtgaatattccagggagtgtacaccccctttgtgatattgtcctaatatccgcaggagagaagataatattactcccaatatcgcagggggtgaacacaccccctgtgatattgtttctaatatccaagcgaggagaaaataatattactcccaatgtctcaggggatatacaccttccctatgatattgtttctaatattcaggtggaaaacgggtgatattactcctaatatccaggaagaaaggggattatgttactccccttatagcagggggtatacacctcccctgtaatattgttcctaatatcaaggctgggatatacgtggggggaaggatgatattactcccaatatcacaggggttataaaaccttctgtgatattgctcctaataaccatggcggaagaagatgatattactcctaatattgcaggaggtgtacactcccccattatgttgttcctagtatgcagaaaaggagaggatgacattattgccaatatcgcagggtgtgtacaccacccatgatattgttcctaatatttagagggacagaggatgatattactcccaatatcgcagggggtgtacacgcatcccctgtgatattgttcttgaaatcgaggggaaagagaattatatttctctaaatattgcagagggtgtacaccgccccctgtgatattgttcctaatagccgggggcggggggagataattaaattactttcaatatctcagagagtgtacatcccccttgtgacattgttcctaatatccagagcaaaagagaatgatattcctcccagtatcgcaggaagtgtacatttaacctgtaatattgtttctaatatccagggggaagagaatagtaatactcccaatatcgtaggggttgtacaccttttctgtgatattgttgcaaatatttagaagagagagagaatattactcgcaatatcacagggaatgtatacttcccctgtgatattgttctaatatctagaaaaagagaggataatattactcctaatattgcagggggtgtacacccccacttgtgatattgttcctaatataaaggaaggtcgaaaaacaaacggggagcccagggggaaggaaggcaggcgaggaagaggcagcgccggggcgccggagggagcagccgggccgcggaagcgcgagcacgagaccggtcgcggtcgcagtcgcatttttgccgttgtcgcggccgccgccgccgaggcttacccggggatgtctgagcccgcgcctcgcggcccccaagctccacgctgcgcccgctgtcccggcctctaagggccgccacgtccctgcggcgcgcgcaggcagaaagcggcttcgtgccggcggagggggcccgggcgggccgggaaaggctgccccaggccccgcgcctaccccatcaccgcggccggcgccgggccgggaggatgagcggtgtggggctctgaagcatggagggggttttgtacaagtggaccaactatctcacaggttggcagcctcgttggtttgttttagataatggaatcttatcctattatgattcacaagatgatgtttgcaaagggagcaaaggaagcataaagatggcagtttgtgaaattaaaggtgacagctttggaggggaccacccttgattggatacataaattctgttcattcagcagacaacacaagaatggaattaatcattcctggagagcagcatttctacatgaaggcagtgaacgcagctgaaagacagaggtggctggtcgctctggggagctccaaagcatgtttgactgatacaaggactaaaaacgaaaaagaaagaagtgaaaccagtgaatcgctgaaaaccaaaatgtctgaacttcgcctctactgtgacctcttaatgcagcaagttcatacgatacaggaatttgttcaccacgatgagaatcattcatctcctagtgcagagaacatcaatgaagcctcttctctgcttagtgccacgtgtaacacgttcatcacaacgcttgaggaatgtgtgaagatagccaatgccaggtttaaacctgagatgtttcaacggcaccatccggatcccttagtttctcctgtgtcaccttctcctgttcaaatgaggaagcgttctgtcagccaccctggttcttgcaccagggaggagtagccactgtataaaagaaccagtatctgcacttcaccgactctcccagcgacgccgaagaacctactcagatacagattcttgtagtgatattcctcttgaagacccagatagacctgttcactgttcaaaaaatacacttaatggagatttggcatcagcaaccattcctgaagaaagcagacttatggccaaaaaacaatctgaatcagaagatactcttccatccttctcttcctgaagaaactgtagtgtccaactttctctaagtattgctatgcaaaagctgctgtaattgaactattgttatagggagtagttttttcccttaggactctgcactttatagaatattgtaaaacagacaaacaagaaaacaaaccacatacttttgaagcgtgttttatctttatatagtttgtttgcaagagtattttcctaataacttcacagtatgaatgtgcatcttttttttctttttttaacaaatgatggtgtaacattttgacatccataaggacaaatgtagatatttttctaaaaaaccgtgaggggactgacagcttggtcagggtgtattgtagcttataaacatgaaatcttacaaggtttcagtttgacagaagtgtgatatatgtaacttgtgccatggaccaaatggtcactttaccacagctaaaaatgagttatgatagcagcttgatggtgattgcattgtattcctttaatcaaaaaggaaacgcaatattctaagtatctttagcccaaataccatgacatattgagcatctttaaataaccagactgtattgtccttcatatgtgaagttgacactactgatttgtcaataccaaattttgggttaaagtgtttaatttttatttatttattttcttgttgcctcaaaagatgattgcattctaacttttgtgacctaccaaatttaagatgtgtatacattgttctttacgttgttctagaaaagagattttaatgctgtagtgacttagctcacttacatcagagaaataaacaactttcaatggaaaaaaatatatataaaggaaggaagaggatgatattacttctcatatagaaggggttgtacaccccccttgtgatattgttcctaatattcagggagggagaggattatattactcccaatatagcagggagtgtacacccccccccccgtgataatgttcctaatattcagggaagcagaggatgatattactttcaatatcacagggggtgtgctgtccccctgttatattgttcttaatattcaggggggagaggatattattatgcccgatatcacaggagaagtacaccccacaagtgatattgttcctaatatccaggggtaaagaggatgatatcgcaggtggtgtacacccctccccgtgatattgtttctaatataaagaaggagagagcatgatattactcccaatatcgctggaggtctacaccccccttgtgatactgttcctaatatccaggaagggaaacaatgatattgctgtgaatattccagggggtgtacacccctttgtaatattgttcctcatatccagggggtagagaggatgatattactcccaatatcgcagggggtgcacggccccactgtgatattgtttttcatatccaggaggggagaggatgacattactctcaatatggcagggggcgaacaccccctgtgatattgtgctagttaggttgggagaaaatgatattactcccaatatcgcagggggtgtacaccgctcctgtgatattgttcctaatatccatgacgggagaggatattactcccaatatcgcagggggtgtacctctcccctgtgggattgttcacagtatccaaaagggaagaggatgatgttactcccaatatcacagggagtgtacaccaccattgtgatattgttcctaatagccagggaagaaaacgatgatattattgtgaatattacagggggtgtacacaccccctgtgatatggtttttaatatacaggttggaaaaggatgatattactcccaatatcacaaaaggtgtacacacccccccatgatattgttcttaatacttcggtggggagaaaatgatattagtctccatatcacaggggtgtgaactcctccggtgatattgtttttaatatcaagaggggaggagatgatattgctttcaatatcgctgggggtgtacatccctcctgtgatattgttccttatatccaggcgaggggaaaataatattactcccaatagtacacaccccatgtggtattgttcctaatactcagggggaaagaagataatattactttcaatatcacagggtttgtacacctttcctgtggtatagttttcaatatccagggggaaggtacatgatattactcccattgcagcaaggggtgtacacacctcctgtgatattgttcctaatatccagaagtggtgaggatgatattactcccagggggtgtacaccccacctatgatattgtttctaatatccaggggaaaagagtgtgatattatgcccaatatcgcagagggtgtacacttatcctgggatattgtttctagtatttggggagggaggagaggatgctattattctcaatatcgcagaaattgtacacccccgctgtgatattcttcataataatcagggaaaaagaggatgatattactaccaatattgcagggggttacacttcccctttggtagtgttcctaatatccaggaagaaagaggatgatattaatcccattttccaggaagtgtacacccaccgtgtcatgttgttcctaatatccagcagggaagaggatgatattactcccaatatcggagagggtgtacacttcccctgttatattgtttctaatacccagggggaagaaggatgacattactgccaatatcacagggtgtgtaccccaccctgctattgttcctaatattcaaaaggaaagatgaaaatattactcccaatatctcagggtgtgtacacctctcctgtgatatcgttcctaatatccacaggaagagagaatattactctcaatattgcaggggggtgtacacccccctgtgatattgttccaaatattcgggcggggagaggatgatattagtcccaatatcgcagggggtgtgcaccaacctgtgatattgttcctaatatccatgcgggggaggacgatatcactctcaatgtcgcaggaagtgtacacctctcttgttatatttttcttaatatccaggagggaaaagatgatattactgccaatatcgcagggtgtgtccaccccccttttatattgttcctaatatccaatggaaaagaggatgacattgctctccatatcccagaaggtgtacaacgcccctgtaatattgttcctaatattttgggggaagagaggatgatataacttataatatcacaggaggtgtacaccacccctatgtattgttcctaatatcctttaagggagaggatgatattactcccaatatctcaggtggtgcctattccccctgtgatattgtttttaatatccaggggaagagagtatgatattacgcccaatatcgcagggggcatacaccctctctgagatattgttcataatatatagagggagagaggatgatattacttccaatatcagaggtggggtacaccccccggttatattattcttgatatccaggaggggagaggttgatattactggatatatagcagggagtgttcacatcttctgtgatactgttcctaatatccagaaaagtagaggatgatattactcccaatatcgcagaacgtgtacacctccctgtgatattgatcctaacattcaaaggggagaggatgatattactcaaaacatcacagggcatgtacactcccctgtgatattgttcctagtatccagaagggagcaagataatattactttcaatatcgcagggggtgtacacccctctttggtatgtttcctaatatccagaaggaaagagggtgctattactttccatattgcaaggggtgtacacccccctgtggtatggttcataatatccagggagggaaagggtgctattattccccatatcgcgaggcatgtacaccctgctgcggtacggttcctaatatccagggggaaagaggatgctattacttcccatatcgcggggtgtgtacacccccgtgtggtatgttttgtaatctccgggaacgaagagggtgttattacccctcatatcgctggaaatgtacactcccctgtggtacggttcacaatatccaggggattgagggtgctattactccccatatcgcggggggagtgcacctccctgtggtatggttcgaaatatccagggtaagagagggtgctattattccccattttgcaggaggcgtacacccctctatggtatgttttgtaatatcccaggtaaggggtgctattgagagaagagagcaaaagaccccccccatattgttctgtattattttatactcagtacctgttttaagaagaaacaaggaagcgaaaccaaaggcaggcagcccggcgccaggcaccagatccaaaaccagacccgaaaccaggcctgggccttcctgaccttagcctgaaagttaaaattcaacccatgacctagcaactgatgttatccatagattccagacattgtatggaaggacattgtgaaatttcttgttctgttctgtttcactctgagtactggtgcatgcagcccttgtcacatacccactagattgctcaatcaatcatggccctttcatgtaaaaaccttagtgttgtgagcccttaaaaaggacagaaattgtgcactcaacaagcttggattttgatactctagtctgctgatgcttccagctgattaaaagccacttccttcactacctcggtgtctgtgggattttgtccgcggctcctcctgctacactgtgactccccttatagagaggggtgtacacccccctttggttcctaatatccagcgggggagtaggtgctattactccccatattgcggggagtgtacacccccttgtagtacggatcgtaaaatcaaggagggagagaaggtgtaattatccccatatcacagggagtgtacacccctttgtggtatagtttgtaatatccacgacgggagagaatgctattactccccatatcgtggagggtgtacaccgccctgtagtatggttcgtaatatccggaaggggagaggttgctattactccccatatggtgggaagtgtacacccccatgtgatatggttcataatatccaggggggtagaggatgatattacccacaatatcatagaaggtgcacacccttttgtgatattgtccataaaatccagaaggggagaggatgatattacttccaatatcacagggggtgtgtagccccatatgatattgtttgtaatatcaaggtagggagaggatgctattccttacaatagctcaaggggtgtaaccttcttgtgatattgtttgtaatatccagaaggggagaagataatttttttattttaaaagtaaactttaatgtcaaaaatgcaaacttgagaagggcagaaagatcaaacagaaggctgccacttcacaattggagggttgcacagtggccgggcagaggcgctcctcactccccagacggtgaggcagccgggcagaggtgctcctcacttccgagatgttgcaggagccgggcagaggtgctcctcacttcccagaacagggggctgccgggcagaggtgctcctcactgcccagacggtttgcaggcctggcagaggcactcctcacttcccaaacggagcagcggcaagccagaggcgctccacacttcccagatggtggggcagccgggcagaggcgatcctcacttctcagagggtagggcggcccagcagaggcgctcctcacttcccacatggtggggcggcaggctagaggcgatcctcacttcccagacggtggtgtggccatgcagaggtgctcctcacttcccagatggtgtggccgccgagctgaggcactcctcacttccctgacagtggggcggctgggcagaggcgctcctcacttcccagacacttggactccgggcagagactctcctcatttcccagatggtggggctgccgggcagaggcgctcctcacttcccagacggttcagaggccgggcagaggcgctctggggagaggataatgttactcccaatatcgcagggggtgcacactccctgtgatattgttccgaatatccagagggggaaaggatgatatagctcccaaaatcgtggggagtgtacacccccctgtgatcttgtttgtaataccaagaagaaaagagaatgctattatttccaatatagcagggggagtacaaccccctgtgatattgttcgtaatatctagggggagagaaaattatattagtcttaatatctcaggggacgttcatccccctgtaatattgttggtaatattcagaatggagaagatgatattgttcttaaaatacaggaaaaaatatgataatattacttccaatatcgaagggggtgtacactctcctgtgatattgttcccaatatccagaatgaaagaggatgctattactcccaatatcccagggagtgtacacccctttgccatattgttcataatatccaggggaagacaggataacattactcccaatatcaccgggggtgtccacccactagtgatatttattgttcatcatatccagaaaaggagaggatgatattactcccaatattgcaggtggtgtacggtccctgtgatattctttgaaatatctagaaaaggagaggatgatatcactccgagtatcacagggggtgtacacccccctgtgatattgttcgtaatatccaggggagaaaaggatgatataattgccaatatttcaggggatgtgcacctccctgtgatattgtttgtaatatccaggggtggagaggatgatattactcaaaataacgtaaacatcctgtgtgtacatcccctgtgatattgtttataatatccaggggggtagaagatgacattacccccaatatcacagagtgtacacacccctgggatactgttcataatatccaggcgggaaagaatgaactacttccaatatcgcaggatatgtacacccccctgtgatatatttcctaatatttatgtgggtaaggatattacccccaatatcacagaaggtgtacatcctctttgtgatattattcctaacatccaggaaaggagagaatgatattactcccagtatcgcagggggtgtacaccacccctgtgatattgttgctaatatccagggggagaggataatattactcccaaaatcacaggggacgtacactcctcctgagatattgttcctaatattcatggggaaaagaatgctactactccaaatacagcagagggtgtacaccatccccgtgatattgttttttatatccaaagggtgaaaggctgatattactcccaatatcgcagggggtgtacaggccccccatgatatcattcttaatatccagggaggcaaagaatgatgttactcccaatattgcaggctgtatacaccccccgtgatattgttcctaatatccagagtaagagaggatgacattgctcccaatattgcaggggttgcacgcacgccctgtgataatattactcccaatatcaacagtgggtgtacactcctcctgtgatattgtttgttatatctaagaaagaagaggatgatattactgtcaatatcacagaaggtgtacagccccttgtgatgttgtttctaatatccagcggtgagaggatggtattactcgcaatattgtagggggtgtccaacggccctgtgatattgtttctcatattcaaaaaggaaaagaataatataactccaaatatcgcagggtgtgtacacttccctgtgatattgatcctaatatccaggaagagagaggatgatattaatcccaatatcacagggggtgtacatcgcttctgtgatattcttcctaatatccagggggggaggggatgctattactcttaaaatcgcagggaacttacactcccactatgatatttttcctaatatccaggaagggagaaaatgatattactcctaatatcacatatcacaatgggtgtacatctccccgtgatattgtttctaatatcaaggatgggagaaaattatattactctcaatatcgcagggggtgtgcacacctcctgtgatattgttcctagtatccagcggaggagatgatattactttaaatattgtagaaggtgtacaacccccctttgatattgttcctaatatccagggggaaaggagatgatattactcctaatatcgcaggggctgtacaaccctatgtgatattgtttcttctaatatccaggggtggagaagataatattactcctaaaatcgaaggggacatacactccccctgtgatatttttcctaatatccagaaggaaagaggatgatattactcctaatattacaagaaatgtatacctgtcctgtgatattgttcctaatatccagaggggtaaatgattatattactcccaatatcgcaggggtgtacaccttccctgagatattgtttctaatatgcagtggaggagaggatggtattactcccaacatcacaggagatgtaaactccccttgtgatattcttcctaatgttcaggacgaaggagggtaatattactcactgtattgcagcagggggtgtagagccccctgtgatattgtttttaatattcaaggttggagaaaataatattccttccaatatcgcatggggtgtacacccttctttttatatagtttctaatatctggggggagaggatgatattactcccaatatcgcagggggattacacccccactgtgatattgtttttaatatccagggtgggagaggataatattactccaaatatcccagggctatacaccctccgtgtgatattgtttctaatatccagaggaagagaagatgatattactcccaatgtcacagggtgtgtacaggccttctttgatattgttcttaatatccatgagggagaggatgatattactcccaatatcgcaaagactgtacaccctttctgtgatattgcttccaatatccagggagggagaggatattacactcaggatcacagggggtgtacaccccaacctgtgatattgtttctaatatctagggaaaatgagggtgatattactatcaatatcacaggaggtgtacactcccttatgatattgttcctaatatccaggagaatgacaggataatattactcccaatatcgcgggtggtgtctccccccactccgtgatattgttcctaatacccagagggggagagaatcatattactcccaatatcgcaggggatgtacacctacatccggcggagtagaagataatattactcacaatatcgcaagaagtgttcaccttccctgttatattgttgctaatatccagggagtgagaagatgatattactttcaatactgagcgtgtacactacccctgtgatattgtttctcatatccagtagaggagaaaatcatgttactcccaatattgcaggggtgaacacctcctttgtgatatttttcctaatatcaggaaagggagagtatgatattacccttaatattgacaggggtgtacacccccctttgatattgttccaatatccaggggggcagaggataatattattcccaatatcgcagagggtgtacaccccccgtgatattgttcctaatatccagagaaataaaaaatagtattatttccaatatcacagggcgtacattttccctgtaattttgttcctaatatctggggggtggggtggcaggataatattactctcaatattggagagggtgtacacccccctgtgatattgttcctaatattcagggtgggagagaatgatgttactcccaatatctcaggagtcgtatacacccccttgtgatattttttctaatatccaggaggcagaggatgatattgctcccaatatcgcagggggtatacacccgagctgtgatattgtttctaatatgcaatatgggggaaggatgattttactttcaatatcgcagggaatgtacactttccttgtgattttgttcctaatatccaggggtggagaagatgctattactatattactcctcatatcgcaggcggtgtacaactccctgtgatatggttcagaatatccagagtgaaaaaggagggtgacattactcccaatatcgggggggtgtacacccctttgtgatgtggttggtaatatccaggggggcagatgagggtgatatcactccccatatcgtggaaggcgtccacttttttgtgatgtggttctttatatcccgaggggagaaggtgatattactccccatatcgcgaagggcatacacccccctgtgatatagctcataatattccggagagtggaggaagatactatgccctatatcgcgggtggcctacaaccccctatggtttggcttataatatccaggggggagagggtaatattgctccccatattgtggagacgtacagccccctgtgatatggtttgtaatatctttggggggcgagggtgatattactccccatatcgcggggagcatacacccccgtgatctggttcatagtatctcaaaggaagaagttgatgtgtacaacttaagggaaaaagttgaagtgaagtgtacacacgccctgtgacgtggttcataatatccaggcgggggagaggagagtgatatttactccccatatcgcgggtgttgtaaactcccctgtgatatagttcataatatccaggggagagaggagggtgatattgctcctcatatcgcgaagggtgtacaaccccctgtgatatggttcataatatccagaagggtagaggacgatgatattactccacatatcttgggaggtgtgatatggttcgtaatatccagcgatgagagaatgatattactccccatatcgcaaaaggtgtgatagggtttgtaatatcctgagggggagagggtgatattaatccctatattgcagaaggactacaccctcccatgacatggtttgtaatatcccagggggtagagtgtgatattactttccatatcacagggggtgtgatatgattcgtaatattcgaagggggagagggtgacactactctccatatcacggggtgtgtgatatggttcttaatatcccaggggttagaggttgatattaccccctttttggggggtgtgtacaccccctgtgatatggttcgtaatatcccgggggagacagggtgacattattccccatatcgaggggatcgtacaccccctgtggtgtggttcataatatccctagggggagatggtgatattactccccatatcagggggcgtgcactcttctgtggtataattagtaatatccagggggcagaggtcgatattcgtttccatatcatgaagggagtacacttccctgtgatatggttcctaatatccaggggggagagggtgatattattccccatattgcggggggacatacaacccctgtgatatggttcataataaccagaaaagaagagggtgatattaatccccgtattgcagagggcatacaccccccctgtgatatggtttgtaatatctaggggaggaaaaggtgatattactttccatattgctgggtgcagacacccctttatgatatggttcataatatccaagttggagagggtgatattacttcccatatcatgggaggtatacccttccctgtgatatggttcgtaatatccagaaggggagagattgatattactccccatattgtggggggcgtacaccttcctgtgatacggtttgtaatatctaggggatatagtgggtgatattactcaccatatcacgggggttgtaacatggtttgtaatatccaggggaggagagggtaatgttactccccatatctcggggcatgtacaccctcctgtgacatggttcgtaatatccaggtcgggagagggtgatattactcctcatattgccgggggtgtgttatggttcataatatcctggggaaggaggctgctatcactctccacatcttgggggatgtacactctcctgtgatatggttcataatatccagggtgggtgagggtaatattactccccatatcgcgggaagtgtacatacccctgtaatattgtttgtaatagaagagagggtgatattactccccacatcgcgggtggtgcccacccccctgtgatatggtttggaatatccagggggatgaggagggtgatattactccccatatctcggtgggagtacatccctctttgatcaagttcataatatccaaaaggaaacaggagagtgatattactccccatatcgccgggggtgtacacgggagggggagtacacccccggcgatatggtctgtaatatccagggaaggagaggagggtgatattactcaccatatcgcaggtggtctacatttacctgtgaaacagtttgtaatatccagggggggaaatgagaatgattttttttttttgagtctcactgtgtcacccaggttggagtgcagtggcacgatcttggctcactgcaacccccgcctcctggactcaagcaattctcctctcccagcctcctgaatagctgggactacaggcgcaccccacaacgtctggctaatttttgtatttttattagagacggggtttcaccatattggccaggctgatctcgaactcctgaccctgtgatccatccgcctcggcctccaaaagtgctgagattacagatgtgagccaccacgcatggcccaaggagaacgatattactccccatatcccagggggtgtatatccccctgtgatatggttcagaatatccggaaggaaagacagggatattacttcccatatcgcaaggggtgtgacatggttcgtaatatcccatgggggagagggtaatattactcttcgtattgtgaagggcatacactcccctgtgatacagttcataatattccggggagtagaggaagatattatgctccatatcgcgggtggcataagccccctgtggtttggttcataatatccagggaggagagggtaatattactccccatattgtggggacgtacaccctcctgtgatatggtttgtaatatcccagaggggagagagtgatattactccccatattgcagggacatacacccccctgtgatatggttcaaaatgtcttttttttttgaaggactggttctttatttcaaaaagacacttgtcaatattcattatcaaaacagttgcactattgatttctctttctcccaatcggccccaagtagaccacatcaaaggagagtacatattaagccaataagctgtaggatgtacacctaacagacctcctagaaaccttaccagaaaatggggacagggtagggaaagaaactttaaaagatcaacaaactgccagcccacggactgcaggggctgtcacagccagatggggtggccagggtgccacaaacccaaagaagcaaagtttcaaaataatataaaatttaaaaagttttgtacataagctattcaagatttctccagcactgactgatacaaagcacaatgagatggcacttgtagagacagcagcttcaaactcagaaaagggtaatgagatgagtttcacatggctaaatcagtggcaaaaacacaatcttctttctttctttctttctttcaaggaggcaagaaaagcaattaagtgctcacctcaacataaggggaacatgatccattctgtaagcagttgggagggggtagagatggaacaaaattttggtctcagaggtcttgccatcttaatttggtcacttctaatgaaaaaaataaaaaatagaaataacattatccaaaggtatcttaaagctgaaaacttgaacagcacattttttgttgttgttgtttggctaactcctcctggaaccacctttctggcttagctagtactttgtacagagcaatgaggcttcccatagtggagtctccctgggctctgtttggctctcagcaaggcaggcctataccttttcctctcctccatggagagaggaatatgcattaaggtgaaaaatcaccttccaaaagtgagaaagggattcgatcgctgcttcagggctgtggtattatatggaatgttttacaaaaggttgctacaaaacaacaaaagaggtaattacaaaatgtgtacatcacaacatactttttaaagacattatgcattgtgctcacattcccttaaatgttgtttccaaaggtgctcagcctctagcccagctggaatctccgggaagaggcggacagtttggtgaaaaagacacagggaaggagcgggcggcggaaggagggggcggcgaaaggagaaagcagccttccagttaaagatcagccctcaattaaaggtcagcttcgggcaggctggcctcaggcggagtctggttcagagggaggagcagcagcagggtgagactgaggcgttctacatctcattcaggtcaagcagagtctggtccagcatcctttgtgtacagaggtgctcccctttggtgcatttcagtttatcttccaagtcatcaattgtcttttccagcttggctaccgatctctcagcaaactcagcatgggtctccgcctcctttattttatcagtaagaatcttgatctcttcctcatatttgtcttctttttgagagtacttttcttcagcagcactcagacacttcaggttctggtccatcagtctaatctgctcatccatctctcggcaaagggattctgccagctcagctcgttcctctgtgcgttccaagtctccttcaatgatcaccaacttacgagccacctcttcatacttcctatctgcctcttctgcaatgtgcttagcttctctgagttggatttcctggagttccatcttttcttcatcttttaaggcccggttttcaataaccttcttacctctctcactctcatcagcagctttttccgcttcttccagcttttgcagggcagtagccaggtgctcctgagcacggtccagctcctcttcaaccagctggatcccacgttcaaggaggccacctcagcctcagcctgttcccgggcccacctttctccctcaacttctcgctggaggcgctcagctcgctcctctgcatcatctgcctgctgctgcagaacctggatcttgcgcttcaccgcctcgatggtggtgatcccagccatggtgcccacccagctactgctagagctccggttcctgcctcctccgatcggcgttgcagcctcctctcacccttacttccgcctcggttcaaaatatcttaagggaaggagttgatattactccccacatcacgggaagtttacatcccctggtgatatggtttgtaatatcccagggtggatagggtgatattactctccatatcgcgaaggagtactcccccctgtgatatggttcataatatccttggggggagagtgtgatattactccccatatcgcgagggccatatactcctttgtgacatggttcgaaatatcccggtgggggagggggtagagggtaatattactccccatacagcgaagagcatacgcccttctgtggcaaggttagtaatacttcagggaaaagagtgcaatattacttttcatattgcagggaacatacactcccctgtgacatggttcgtaatatcccgggggctgagagggtgatatttctccccatatcaccgggggcctacacctgggtgtgatatggctcataatatacagggagggagagggtgatattactccacataccgagtgaggggttacacaccctcgtgacatgttcgaaataccccaaggaggagacaatgatattactttccctgtcgcgggggctacaccctcccagtgatatggttcacaatatcccggggtggagagggtgatattactccctatatcaccggggggtgtacacttccctgggaaatggtttacagtatccccggggggagagggtactattactccccatatcacgttacatatcagggtacacccccacgtgatatggtttgtaacatcccaggaggaagaaaatgatattactccccatatcgcggtggcatacacccctccccgttaaatggttcataatatcttggggtggagagggtgatattactccccatatcacgtggggcatacaccccactatgatatggttcataatatcccggaggggagagggagatattactctccatgtcgcggggggcatatacacccctgtgatatggtttgtgatatcccgggggcggagagggagatattactctccatatcgtggggtcgtacacttttctgtgatatgattcgtaatatccagacggggagagggtgatattacttcccatattgcgggggcgtacacccctctgtgatatggttcataatatcccgaagaaaagagggtgatattactcctcatatcgcggggaacacacaccaccctgtgatatggtttgtaatattcagcgggggagagagtaatattactccctgtatctcggatggcgtacactcccctgtgatatggttcataatatccagaagaaaagagggtgatattactccccatattccagggaatgtacaccaccctttgaatatggttcgtaatatccaggaggggagagggtaatattgctcccaatatcgaaggaggtgttatacggttagtaatatccagagaaggagagggtgacattactccccacatcgtggtgggtgtgcacccacctgtgatatggttcataatattcaggttaagagaggtgatattgctttccatatcgccaagggtgtacactcccgtgaaatacagttcgtaatatccaaaaggggagagggtgatattactcccatatcgtggggggtgtacacccctctgtgatatggttcataatatccagggtggaataaggtggtattactccctgtatctcggggcatgtacatcgcctgtgatatgattcataatatccagaagaagagagggtgatattaatctccatattgctgggggtgtacaaccccctgttgtatggtttgttacactgagttggggagagggttacattactctcaatatcgagtggggcatacacacttatgtgatatggttcataatatcccagggaggagagggtgatattactccccatatcgcgggaggcatacaccccaatgtgatatggtttgtaatatctacatttttttttttgagacgaagtctcgctcttgtcccccaggctggagtatgatggccggatctcggctcactgcaacctcagcctcccgggttcaagcgattctcctgccttggtcccccaagaagttgggattacaggcgcacaccaccacgcccggctactttttgtatttttagtagagaaggggtttcaccatgttggccaggctggtctagaactcctgacctcagatgatccacctgcctcggcctcccaaagtgctgggattacaggcgtgagccactgcacctggcctggtttgtaatatctatgaagggggaaggtgatattactttccatatcacgggaggcgtacaccacgatgtgatatggtttgtaatatccagggggtatactgggtgatattactccccatatcgcggggagtgtatacccttttgtgatatggttcctaatattaagctgaggagaaggtaatattactccccatatcgcaggggtttttatatggttcataatattcaggaagagagagggtgacattactctccatatcacggggtgtgtactcccccatgtgatatggtttgtaatatccagggaaggagaggttaatattactccccatatcgcagggggtgtacacctctctgtggtttgtaatatccaaagggaagaggatgatattatcttcaatatcttggggggatacagtccccagtgatattgttcataatatccagagggggaggggatgatattactcccaatattgcaggtggtgtacaaccccctgtgatattctttataatatagagggggatgatgatattactcccaatatagtaaacaacctgtgtgtacaccccctgtgatattgtttataatatccaagggtggaaaggatgatattactcctcatatcgcagggggtgtatacccctctgtgacattgttcctaatattcaggggaggagaagatgatactactcctcatatcacaggggatgtacacccccctgtgatacttttggtaatatccaggggaggagaaaattatattattccccatgtcacagagggtgtacaccccgctgtgatagtgttcataatatccaggtgaaaagaggatgatattactccgaatatctcaggaagtgtacacccttctgtgatattgttcataatatccaaaggtggagaggaggatactactccccatatcgcagtgggtgtacacccccctgtgatatggttcataatatccaatgtaggagaggatgatattactttccatatcgcggagagtgtacatccccctgttatattgtttgtaatattcagggagaaagaggatactactactccccatatcacacggggtgtatattcccctgtgatatggttcctgatatccaagagatattataatcctctcttggattatgctacctctcatatcgcatggggtgtacacacactttgtgatatcgtttgtcatatccaaggagggagaggattatattaatcccaagatcacggggggtgtacaccctcctgtgatattgtttgtaatattaaggggggagaggataatattactcccaatataattaacaccctgtgtgtactcctccttgtaatattgttcataatatccaatgggggagacgatgatattactttcaatatcgcagaggatgtacatccctttgtaacaatgtttgtaatataaaaggcaagagaggatgatactacttccaaaattgcaggacatgtacaccccccggtgatattgttcctaatatccagtggggaagaggatgatagtagtcccaatatcgcaaagggtgtacacaccccctgggatattgttcctaatataaaaggaggagaggatgctattattcccaatatcacagaaggtgtaaaatcccctgtgatattgttcgtaatattcaggaggggagaggattatattactcccaatatcacagggtgtgtacacagggaggggcaagggccagaagcgggcgggaatccccatgtttgggcggacccagtttctaatggccagcatttgccaatcaaagcttaccagagaactctaaaagccagggctttcctgctagacaagactcatttctggaactgctttaaaaagaaacaaaacttcccaaggaccccttttcctctctgtctgcctaaaataatgttttaaaaactcctaaagcagctgaattcagcccccttcctgggggaatgtatagacggaactcccacctttcccggcatcccaaggccagagtatgtgaaactcctgggtctctatgtgtgtctgagcggctgctctgccaacactccacacagccctgtgtcctggacccaaggcccttatgacctgagctcaagaggggatctcctgatccatgggttgcaaagatccatgggagaagcatggtttctggggcggggtcacacgctcagtcactgtttccctcggatgccggagatggttcctttggctctctgccaatacagggtgaatcatcatccatccctcttttctttgttctcccgggtcaagttgtttgcctagtcagtcccaatgtgagaacctgaatatttcagttgacgcgctgacttcaaaatccccgggcttcgggaggcggagcttgcagtgagccgagatcccgccactgcactccagcctgggcgacagagcgagactccgtctcaaaaaaaaaaaaaaaaaaaaaaaaaaaaaagtccccgggcttttcttttcactcagtggaaggcagctgcttctaattggccatcttggcccgcccccaccacgtgaccttctgtaaaatgcctccactctccaggaacgctctcattatataactttgcctgaaaccaacagcacgctcattgcacatatcatgggctcatttatttcacttataaagaacctggccaaggaagagatagtgcctaaagtggccagtattctgaccgatatgttagaaaaatggtgtgccgaccaattcatgacatgtgtcccaaaactagcaacggaaattgtattcgccgtgttgaggtctctaatccagatgatgctcatctatgtactggaaaaggcagagtcctttcctgacaagctgctgaaactcttcagaaacatctcatatttcctgaagaagatgatgtctggacaagcagcacaggtcgttcagatttaactttctattcatatatccagcacgatattcgcacaattgtcacgaaaccttaccagttgatgagtcctgcacatttcctttaatttcaggaggaagagggtaatccggatgagttttctgacctactctgctgctgtgattaaacaaccaccaggaaattttgacgacactgttctcctgagctcctccctttcctccgggaacaaaacaattgaatttacaaaaataaagtgttatttgactggagtgaggtctcatgtctgcttatgcggtggctcgctgctcagaacagggtgagtctctgggttgtgtgctgaggaggggaggctctcaatctggagaaaacccactgcaggggacacctccatggggtctgagggactgaggatgaggagccggactgggtctagggaaggaggaggtttcagagggtgaaattctggcactaaagcctgggggtgtttgggaacttcctccttccgaagaagtttcagggagggataaagacaaaccctgggctccttgaggggcccttactaatttgagaggactctatcgggaaggagagtgacaatggcctccttgaggactgaggcccctgaataaatgaggcccagatacagtccatgggggatgagaccttcaagggtcacattttggttgggacagaggaaaagtgcagctctgcagccgcagaggaaaacccggcagtgtgaaagcgaccttggaggggccctgtgcgctctgaatgcgtctgagcccccatcccctgtccccgcctctctttctggattcttccagctcggctgtctccgccatcttctgagcgctccaccctgacttattcaagtttcccttctgccttccaagtactccaaaatctttcagatctgtgtccctacccctgtttttagcatgtgttggggctccaggtccctgaaggtttctggcctgaaatccacctccccagcggagtggactgcgttctagagactccacactccgcgaggttcccaggcccctgagggacaaccgagtggcctgcgcacttcagggctccacactcggcaaggtctttcaagcccttggggtccccttcttagttttttccacctttctgggctgcagtcactccataaatgctgggatctgatccccacccccactctcgtttcctcaattctgcgggctacacgctctggcaaggtcctccgggccctggatcccctccctctccctatgcccacgctcctagtcagcccttctggggtccactattttcaggaactaaccgttctcatggagccttgctaaccggaaagctgtgtggaagaaaggctttgaggatagaggtggagatttggctcttccatagtgccactcacccaccccaccatgctgccactgccagacccggacccctgtttcagaacaagtgaccagattcgctcctggacagccctggacactggccttttctctgaaaactactcaccctttctctagtccccacttcatgccagcctcataccctcttccttcccccacgctggcttccgggatcctcctctgctcagacaacctcttctgtgtcccacccccgtttttagaatgctttggggcaccaggttgggggaaggtttctggcctgatatccatctctttccaaactcccttcttcccttgaaaggcttcttgccttcagccccacttctggctccgaggtttcaggacaccctcctcttcatcctcattcttttgaccaccagctttttaggaattcgaacgtccctctcatcttcgtgaatcctgtccaggcatttgttgaccccttcatctgatacccctgacctcacattgccaaaagtctacccctacccagtacactggaattagacaaaatcccaggagttttacctcaactctgagtgtgcccacaggagctctccctgaagccacgtccttttaagcagggtctagggttcctcccttgtcttaatgaactctttgtcacacggaggacgttatggagcccttatgatctttcactgcctttctgcccagcgttttgtctttccatggacatttataatattttccatggacattttgttctctcaatgtccacccctaatttccaacatcccaaagattctcatgtgtttcctgaaagccatttacaggaatggctgtgcccagacccccttccccaggatcctccttcacacctggtaggtgcctctcctagagagatttgcactcagttgtcgtgcagtcacatggcccagatggttgttaatcacccccttcctggcaacagctagcagccagggaatcactggcacagaaacctcagggtgaccaagatgaggccacctctgtgctgaaggctgtgctccagagcctgcttgggatcaggcttaagcaggtcttcagccagacctgatgttacctggtttccttgagctgccctgcctgagctatcgggagcactccctcaatgcacatcttgattccctatctcatgctctgcttctagaaaccatgagctatcaattgctactggcaatggtcctgggaagtcaaccctaagtatggattctggggttggatgactccccacaggacttcagtgagcaacaatcactgctggcagttggaggacagagtcgctagggcatgtgaccactgtgaaaccaccgatgtttcacctggggtaattttggatgaactacggtagaagcactgaaggtacattgcttttggtttggaagattgtaggtaaataatagcgatatgaatgtggaattggatggctgcaaacgagtgccattgatgcattgaaagaggaaaagtcaggctgtcacctgtcactcagcaatttaaagtgtgagagttgggactagatgtggtggctcacatctataatccagagattcgggggaagcttgaagaggtaggatcttttgagtccaggagttccagaccagcctggacaccagagcaagacctcatctctacaacaaaattttcttaaaaattagatgggcttggtggcacgcacctgtacttgtagatctagctaatggggagcatgagataaaaaaatcacctgagtcagggacttaggggttacaatgaggtatgattgtgccagtgcacacactcccacctggccaacagagtgagattctgcttccaaaaaaataagaaataaatcaggtttgagagttggaaagcatcatcttctcctagagccaaaggacatgtacaactgagacccaggaacaaagcttcatcacaaagagaccatcatcagtggagccgggagatgcattccccctcaccctgccttgaggaggcagtggagtcatctgtctgggatcctttctgacccagccctatttgtttgtctctttggcttctttggatttgtatattttagctgttataacactgtaaaacaaacagagtgatttttttgagttgtgtgaatgatgctagctccatagtcaccctgagagtgatgggaacttttgaatttgtggcaagttggagggtagtgtaagtgacctgagattgccaaattggggctagcactggatgtgaggttaggctagtggaaaaatatgcccagaaccagaggagtgtgggctcactgcaggtggttaggctcagatccaaattgtacagatggatagctttggggtaaagaataacatagttgagaagtgcatgtgttagtctgttcatgcactgctataaagaattacctgagactgggtaattatttataaaactcaggtttaattgggtcatggttccacaggctgtacaaaaagtatgatgctggccatcagctcaacttctggggaggccccagaatagttagagtcatggcaaaaagtacaagggaagcaggctcatcttccacggccagagctggagcaagtggtaggagaggtgatacacactttcaaacaagtaggtcttttgagaactccatcaccggacagcacctatgggatggtgctaaattattcatgaaatatccgcctccataatccactcaactgtcaccagcgcagccagccccacctccaacagtggggattacaattccatatgaggtgtgggtggggacacagctccaacctcaatcagtgggcatcctggattgggtctactatagaaggagaaccaggagctgactatgatcttgaaccctacccatgatggccgggcggggtgactcatgcctgtaaccccagcactttgggaggctgaggtgggtggatcgcctgaagtcaggagttagagaccagcctggccaacatggtgaaaacctgtctctactaaaaatacaaaaaattagaccggcgttgtgctggatgcctgtaatcacaccactacgctccagcatgggaaaaaataccaaaacttcgtctcaaaaaaaaaaaaaaaaaaaaaaaaaaaaagactgcccatgaccactgcaccagtgagagggacaccagcatcactgagatgcaagggctggacattcttcataggtcagagctcaaagcaggggacactgatacagagatgggctccatccatagcaccaaagtggtgagaggatgtgggaatggcagaggccagcactttgccatcaatgcaagggggtataaggaggtgacaccagtgccagagtacatcacggggggactgccctacaatatctaggacttacctcttagagcgtgtttcattagcgacaacagatataaatggcagacaggtgtgtccctgcattaacaggaaatagaaatcatcaagaggaacagaaggcagatgtcagcagccccttagaaagtcatcatccttcatacagttaaaatctgagacagttctcacacgagaaggcctaactcaaaaagaggctgggttctcatgaggcaggtttatgcaaaaccaaggaaggtgtacaagtttggaattctccagtttcccttggaaaagacctacagtcatttgcttaggtaactgagcactgaacaaaggtgagtattgttgtcttttagaagctcttggccaagaaggccttgttggcataaaacccatggtttggaaacatcaccatgacccctgttagagtaatggcctaagggtgggggtcaggaaattgatgtattccttgccaacttctgcctctaagtgagtgaactctgtttgtgaacctctctcctctgtggttatgttcctaggctctcatgtataatcaggagtcatagacttagaaacaggaaaaatacttacagtgtttttgtggcctgtgagctatgacttataattttaggaaaaaaacaattgcaaatggaaagcctaagtctatcaatgctcatccaagacaacataatcaataaaaaccaatatcaaatctcaaggcaaattatttcctgtatatagatggcagagatgagcaccaccatcaaaaactcaaggaccagtgctgtgggtccagtcatctgtttcatggaattcaccagtctggtatcttcaaaatccagaaggatgatggcagatggcaggaaagtaatgcaaacgtcatcaggtgtgaccccactgtagcagctgtgatggatgttttctctcaccatagcaataaataacacaacctcggtcacactgtatgcattgttggtctgcaaaatccatgttttgcaaaactcttcaggaaggtggatctgtaatattggcattgacatgagaacaacagcagtatttattcacaatctcaagctctctgtcttcccgtctctctcattagccatccaagtagtcctgaggaaccaagcccatcagaacattctgcaacataatacacagctccattctccattcaaattttgttgttgttgttgttgttgatgagacaacatcttactccatcagccaggctgacgtacagtggggctatctgggctgactgtagtcttgagcttccaggctcaaggcatcctctcacctcagcctcctaagtggcttgaactacagacacacagcgacatgctgggctagtttttgtatattttgtagagacgtgctctcaccatgttattcaggctggactcaaactcctgagcgtaagtgatccaagcaccttggcctcaaagtgctgagattacaagcctgagccactgcacccagcccaatctccattctactgataacaatgtcattaccaggtctgatggacaggaaatggtaaggtttctgaaaacctaaggatcacacagcgagttccaaaggctgaaagtgcatacctgtcgacactgataccaatgacatccaatggtgagaatgacattccttgtagtcctagctctgctcataacaaatctatactgaagtgtaagagtttgatggtcatggggattttccatgtctctgcctttcagcgatgtgccatatctgtgaagtgttcagaaatgcaacagcctgaggcatgctgggcatatcctctaataaaaaggaaaatgccattttatggtcctgtatttctacaagttggaacacatgggcctgtgatccagatgggggaaatgggaatattcccactcattcaccttcatccacgaagcccatttgaaagctttgggcttcccatccttgtagattttagtgttgtgggctgggtgcagtggctttcacctgtactgccaacactttgggaggcctagacaggtgaatccactgaggccaaaagttcgagaccagcctggccaagatggtgaaaccccgtccctactaaaaatacaaaaattagcaaggtattggggccagcacctgtaatcccagctgctcgggaggctgaggctggagaatcgcttgaacccaaaaggcagagactgcagtgacccgatcctgcctttgcactccacctgggcaagcagaacaaaacttctgtcttgaaaaaaaaaacaaaaaacgaacaaaaaagatgttagagttctgggtttagaggtctataccccagaaagagaatggtttcaacaagggacaaagaagttgctttaaacgttgacttgccatttcttttcagtgtgtttgttctcttgcgtcaagagaccaccagaaaagtggtgcaattactctcctgtcaagaatcattgactatcatctgcaagagggtcagatcctggtatataattagggcagaaatacttagtctgagaagggtatgacatccagaggccctattaatgatgtccttttctccatgcctgactctgaccccatgtgctggactgcccctgtgtggatggcctcatggcctgctcggactctgaggtcccaccccaagtggcacctccatggagggctctactcttgtatgggctctgacactcacactgagacactctcccatggacacctcttcacccacttggggtctgaaactgggctactccatccctccctaacctggaacagagagctttcactgctattacacaagtcatagaggctaactcctcatttttccaagctaattattgaaacattagtcctgggttgataagacaagataagttaacttttcataaatttgcttatcaagttttgaataaattcaaataaattcaccttccccacacaccttagttgtcgacatcacacgcgcacccatactcacagggtgagcacgaaggcttcactgtcagtggagaaagtggcaaaacccttctgtgcctcatcctggtctagacctggccctcatcctttcccactcttcccctcactcccttggattcatccacactggcctcctgcctgctgctccacctccctgcgaagctcacccctgcctcagggcctttgcacgtgcagtggcttcaagccatatcctcttcacccagatctcccagatctcctgaatgatcttcttttatcattcaggtctcagcttgcatgtaatcttctcagtgaggattacccaaaccacatagttcattcattcattcaaatattcattcaatggcatattgacaaagcagctacttcatgccaggccttgggccaggtgttatggatatggcaacaaacaaaacaagagttttctgctctcaaatttttacccacttaaaggagatatcatacatcatctgtaaataaatacatcatctgtaaataatgatgtaaataaatacatcatctgtaaatctgtaaataatgatgtaaataaatacatcatctgtaaataaataaagtataataaaagaaaatagtaggtttttttggttggaggtgaccgtgaagtttgcaaataccatcttacaacacattattttattttatttcatttcatttttaattttattattattatactttaagttttagggtacatgtgcacaacgtgcagatttgttacatatgtatacatgtgtgaagttggtgtgctgcacccattaactcgtcatttagcattaggtatatctcctaatgctatccttcccccctcccccaccccacaacagtccccggtgtgtgatgttccccttcctgtgtccatgtgttctcattgttcagttcccccctatgagtgagaacatgcggtatttggttttttgtccttgtgatagtttgctgagaatgatggtttccagcttcatccatgtccctacaaaggacacgaactcatcattttttatggctgcatagtattccatggtgtatatgtgccacattttcttcatccagtctatcattgttggatatttgggttggttccaagtctttgctattgtgaagagtgccgcaataaacatacgtgtgcgtgtgtctttatagcagcatgatttataatcctttgggtatatacccagtaatgggatggctgggtcaaatggtatttctagctctagatcactgaggaatcgccacactgacttccacagtggttgaactagtttacagtcccaccaacagtgtaaaagtgttcctatttctccacatcctctccagcacctgttgtttcctgactttttaatgatcgccattctaactggtgtgagatggtatctcactgtggctttgatttgcatttctctgatggccagtgatgatgagcatttcttcatgtgttttttggctgcataaatgtcttcttttgagaaatgtctgttcatatccttcacccactttttgatggggttgtttgtttttttcttgtaaatttgtttgagttcattgtagattctggatattagccctttgtcagatgagtaggttgtgaaaattttctcccattctgcaggttacctgttcactctgatggtagtttcttttgctgtgcagaagctctttagtttaattagatcccatttgtcaattttggcttttgttgccattgcttttggtgttttagacatgaagtccttgcccgtgcctatgacctgaatggaaatgcctgggttttcttctagggtttttatggtttgaggtctaacatgtaagtctttaatccatcttgaattaatttttgtataaggtgtaaggaagggatccagtttcacctttctacatatggctagcctgttttcccagaaccatttattaaatagggaatcctttccccacttcttgtttttgtcaggtgtgtcaaagatcagatagttgtagatatgtgacattatttctgaggactctgttctgttgcattggtctatatctctgttttggtaccagtaccatgctgttttggttactgtagccttgtagtatagtttgaagtcaggtagcatgatgcctccagctttgctcttttggcttaggattgactttgcaatgcggggtcttttttggttccatgtgaactttaaagtagttttttccaattctgtgaagaaagtcattggtagcttgatggggatggcattgaatctataaattaccttgggcagtatggccattttcacgatattgattcttcctacccatgagcatggaatgttcttccatttgtttgtatcctcttttatttcattgagcagtggttttagttctccttgaagaggtccttcacatcccttgtaagttgggttcctaggtattttattccctttgaagcaattgtgaatgggagttcactcatgatttggctctctgtttgtctgttattggtgtataagaatgcttgtgatttttgtacattgattttgtatcctgagactttgctgaagttgcttatcagcttaaggagattttgggctgagacaatgggttttctagatatacaatcatgtcgtctgcaaacagggacaatttgacttcctcttttcctaattgaataccctttatttccttctcctgcctaattgccctggccagaacttccaacactatgttgaataggagtggtgagagagggcatccctgtcttgtgccagttttcaaagggaatgcttccagtttttgcccattcagtatgatattggctgtgggtttgtcatagatagctcttattattttgagatatgtcccatcaatacctaattattgagagttttcagcatgaagggttgttgaattttgtcaaaggccttttctgcatctattgagataatcatgtggtttttgtctttgggtctgtttatatgctggattacatttattgatttgcatatattgaaccagccttgcatcccagggatgaagcccacttgatcatggtggataagctttttgatgtgctgctggattcggtttgccagtattttactgaggacttttgcatcaatgttcatcaaggatattggtctaaaattctcttttttggttgtgtctctgcctggctttggtatcaggatgatgctggcctcataaaatgagttagggaggattccctctttttctattgattggaatagtttcaggaggaatggtaccagttcctccttgtacctctggtagaattgggctgtgaatccatctggtcctggactgtttttggttggtaagctattgattattgccacaatttcagatcctgttattgctctattcagagattcaacttcttcctggtttagtcttgggaaggtgtatgtgtccaggaatttatccatttcttctagattttctagtttatttgcgtagaggtgtttgtagtattctctgatggtagtttgtatttctgtgggatcagtggtgatatcacctttatcattttttattgcatctatttgattcttctctctttttttctttattagtcttgctaccggtctatcaattttgttgatccttttaaaaaaccagctcctggattcattaattttttgaagggttttttgtgtctctatttccttcagttctgctctgattttagttatttcttgccttctgctagcttttgaatgtgtttgctcttgcttttctagttcttttaattgtgatgttagggtgtcaattttggatctttcctgctttctcttgtgggcatttagtgttataaatttccctctacacactgctttgaatgtgtcccagagattgtggtatgttgtgtcttttttctcgttggtttcaaagaacatctttatttctgccttcattttgttatgtacccagtagtcattcaggagcaggttgttcagtttccatgtagttgagcggttttgagtgagtttcttaatcctgagttctagtttgattgcactgtggtctgagagacagtttgttataatttctgttcttttacatttgctgaggagagctttacttccaagtatgtggtcaattttggaataggtgtggtgtgatgctgaaaaaaatgtatattctgttgatttggggtggagagttctgtagatgtctattaggtccgcttggtgcagagctgagttcaaatcctgggtatccttgttaactttctgtctcattgatctgtctaatgttgacagtggggtgttaaagtctcccattattattgtgtgggagtctaagtctctttgtaggtcactcaggacttgctttatgaatctgggtgctcctgtattgggtgcatatatatttaggatagttagctcttcttgttgaattgatccctttaccattatgtaatggccttttttgtctcttacgatatttgttggtttaaagcctgttttatcagagactaggattgcaacacctgcctttttttgttttccattttcttggtagatcttcctccatccctttattttgagcttatgtgtgtctctgcacgtgagatgggtttcctgaatacagcacactgatgggtcttgactctttatccaatttgccagtctgtgtcttttaattggagcatttagcccatttacatttaaggttaatattgttatgtgtgaatttgatcctgtcgttatgatgttagctggttattttgctcattggttgatgcggtttcttcctagccttgatggtctttacaatttggcatgtttttgcagtggctggtactgactgttcctttccatgtttagcgcttccttcaggagctcttttagggcaggtctggtggtgacaaaatccctcagcatttgcttgtctgtaaaggattttatttctccttcacttatgaagcttagtttggctggatatgaaattctgggttgaaaattcttttctttaagaatgttgaatattggcccccactgtcttctggcttctagagtttctgccaagagatcagccgttagtctgatgggcttccctttgtgggtaacccgacctttctctctggctgcccttaacattttttccttcatttcaactttggtgaatctgacaattatgtgtcttggagttgctcttcttgaggagtatctttgtggcattctctgtatttcctgaatttgaatgttggcctgccttgctaggttgcagaagttctcctgggtaatatcctgaagagtgttttccagcttggttccattctccccatcactttcaggtacactaatcaaacgtagatttaatcttttcacatagttccatatttcttggaggctttgtttgtttctttttactctctttcctctaaacttctcttctcacttcatttcattaatttgatcttcattcacttatatactttcttccacttcatcaaatcggctactgaaggtattgcatgcatcatgtagttctcatgccatggttttcagctctatcaggtcatttaaggtcttctgtacattgttttctctacttagccattcgtctaatcttttttcaaggtttttagcttccttgtgatgggtttgaacatcccctttagctcagagatgtttgttattactgaccttctgaagcctgcttctgtcaacttgtcaaagtcattctccatccagctttgttccattgctggtgaggagctgcgatcctttggaggagaagaggtgctctggtttatagaattttcagcttttctgctctggtttctccccatctttgtggttttatctacctttggtctttgataatggtgacctagagatggggttttggtgtggatgtcctttttgttgatgttgatgctgttcctttctgtttgttagttttccttcgaacagtcaggttcctcagctgcaggtctgttggagtttgccggaggtccactccagaccctgtttgcctgggtatcaccagcggaggctgcagaatagcaaatattgcacaacagcaaatattgctgcctgatccttcctctggaagcttcgtctcaaaggggtgcctggctgtatgaggtgtcagttggcccctactgggaggtgtctcccagttaggctagatgggggttagggacccacttgagaaggcagcctgtccattcacagagctcaaacactatgctaggagagccactgctctcttcagtgctgtcagatggggatgtttaagtctgcagaaatttctgctgccttttattcagctatgccctgcccctacagatggagtctacagaggcaggcaggcctcattgagctgcggtgggctcctcccagttcgagcttccagaccactttgtttacctactgaagcctcagaaatggtgaacacccctcccccacccagtctgccgccttgcagttccatctcagactgctgtgctagcagtgagcgaggctccatgggcgtgggacccactgagccaggcacaggatataatctcctggtgtgccatttgctaagaccattggaaaagcacagtattaaggtgggagtgtcccaattttcccagtacagtctgtcacgggttccctcatctaggaaaggtaaatcccctaaccccttgtgcttcccggtgacgcaatgccccaccctgcttcagctagccctccatgggctgcatccactgtccaaccagcccaatgagatgaacaaggtacctcagttggaaatgcagaaatcacccatcttctgtgtggatcaggctgggagctgcagaccggagttgctcctattcggccatcttggaatggcaatctatgtttgctttttacatttgaaaaaactggtgtcacgtacctaggtattaatcattgtggtatcctcttgccgatttacctctttatcattaactagtgaccctccttgtcttttgttgttacagtctgtgattttagtctattttatctaatatgagaatagctactctggcacttttttggtttccagcttcatgaaatatccttttccatttccctgttttcatttccctttcggtgtctctatagatgaagttgatttctttaaggcaccataagttgggtcttatttctttatccatttgaccatttagagaatttagaacactgtcagtgttattattcataagtaaaaacttaagagtgggtgtagtggtgtacatctgtatttcctgcactttgagagactgaggcgagctgatctcctggggtcaggagtttgagaccggcctggtcaacatgatgaaaccctgtctctactaaaaatacaaaaattagccaagcatgctggcatgtgcctgtaatccaatttacttgggaggctgaggcaggagaagcttgaacctgggagacaaatgttgcagtgagctgagatcacacagagaagtcatctccactctcctcatcagaacctcttgttcacagcatttgtgagcacaaatcaatgatggttattctttcctactaattagggatattttattacacagcaatagcctccagcaaagggaaccatcatacatgattcctacaagttgacagggctggaattatcactgaaaaactaaggtggctatacttgattcccaatgtccaatttttcatgaatagagaaatttatcctttttccccccagccagaaaccaagttttgctcttacgcccaggctggaatcaagtggcacaatctcagctcactgcaacctctgccccccagcttcaagaaattcaccttttgaacaaggagatattaaggatacactatgtgtatgctaccggtggttgcaggagactcagaaaagagagaaacagtcactggcctcgtgcaactgatattctcgggaggagagaaaggcaatcaagaaagaaacatgctgtatttcagacagctgtaagtcctccacaagaaaagaaagcaggtgaggaacataggaaatgtgtcaaccataaggttcccgctaattctataagttggtcagggatatcctccaagaataagcagcatctgagcaatcacctgaagggaggaaggaaggaagactgtgagtggtggcttacacctgtaatcccagcactttgggaggccaaggagggcagattgcctgagctcaggagttcacgaccactcagagcaacctgttgatacccaatctctactaaaaacacacaaaaaaattacccgggtgtggtggcacgcacctgtagtcccagcttccatgcccagctgatttctctctctccatatatatatatatatacacatatattgtttttgcagagatagggtctcactgtgtcacccagtcatcaagcaattctcttatactgttttggaaaagcatgggaattacaggtgtgaaataccctgctggtcctgaaaaatgtgatatttgggattctctgcctggcttgttttacccaaaataatgacctccagttccttccaggttgctgcaaaagacatgattttcactgttttataactgaatagtattcctgtatgtatacataccacattttctttatttattcttctgttgattgacatgtagggtgattccatgtctttgctactgtaaataatgctgcagcaaatatttgtgtgcattttgatctattcctttgagtaggtacccagtactgcaactgcaggactgagtagttgttatattttttgttctttcagaaatctccatagtgtttgccataaaatctgcactaatttacattcccaacaacaatgcataagatttccccttttctccacattctcactaacatttgttatgtttttgtctttttcataatacccattctgactggagtaagatatctcattgtggtggttgttgatatttttgagacggggtctcactctgttgccagactggagtgcagtggtgtgatcgtggcttgctgcaacctccacctcccgggttcaagcaattctcctgcctcagcctcccgagtagctgggactacaggcgcgtgccaacaggcctggctcattttttgtatttttagtaaagacagggtttcaccatgttggccaggatgatcacagtctcttgagctcatcatacacctgcctcagcctcccaaagtgttggaattacagtcatgaggcagcgcacccaacctcaatgtggttttaatgaccatttctctgacgattcatggtgtggagaatttctttgaaataccttttggccatttatatgtgctcttttaaaaactgactcctgtccaggtgcggttgagcatgcctgtaaccccagaacttcgggaggctgaggccaatggatcacttgaggcaaagaggcagaaatcagcctggccaacaaggcaaaaccccatctttactaaaaatacaaaaaatcagccacgggctgtgactcgtgcctgtggtgcaagttactcaggaggttaaggcacaggaattgcttgaacccggtaggcacaggtcacagtgagccaagatcatggcactgcactacagcatgggtaatagagaaagacctgtctcataaaaacaaatgaataaataaataagataaaaaataaaaaagtctctttatgtcctttgccgactttttaatgggattctttggagttttctgttgtagttgagatctttgtttactctcggtattagtcttttgtcaaaggaaaagtttacaaataatttcttccgttctgcagtttgtctgctcactctgttgagaggattatttctttggctgtgcagcagctttttgtttcagtaaagcttttgaatttatataattaaaattttcagtttggtttaaatttgcactggtcgatttttggttttgttgcctgtacttttgaagtcatactcttgaactctttactagacaataaccagaagagttttctctagttttcttctcacatttttattatttcagtacatatatttaagtctataattcatcttcaattgatttttgtagaaatagtgagaaataggagtccaggtttattcttctgcaaatgacaattcaattgttccagcaccaattattgaaaagggtgtgctttcctcaacgtatattcttatcagctttgtcaaagatcagttggctataaatgtgtggctttctttctgggctctctagtctgttacatcaatctgtgtgtctatctgtatactactaccatgctgtattggtgatgatggctttgtaatataatttgaagtcaagaaatgtgatgctcccagctttgtttatttgcttcagaaaggctgagtcaacagctgcagagatgaagctgcccctcctcgcagggctccttcccggaaaaagatcatggctcccactgaccatataaccatggctggaactcctgaaattcccaaagggaggccctacccagtgaggggggatgaatgaaggtcctacttaaggaatctgtctggccacaatcaggcacagcagctgtgctgccttgtgggggaccagaccacctggattccctggagcctgcaggctagaatgtctgagtccatggaaacacagaaatggaggccgccctcacctccccagaaaactgtagtctcaggcagtctccagccgattgccactggttggctgctattccaagccagtgggtcttaacttgagaggtgctgtggaagtggggcccacggaatgaggctgcttggctccctggattcagccccttttctaagggaatgtacagatggaactcccgccttgcccagctttccaagtatataaaactcctgagtctctgtgagtgtctgagcgagtgctctggcaacattcgacacggctctgtgtatctgacccaagacccttatggcatgagctaatgggaggatcttctgatccatgcgtggcaaagatgcatgggagaaacatggtttgtgggtaggggttgtgcattcactactgcttctcttggctgtaggtgaaggtttctttggctctgtgctgatactgggtgcaccatcacccaccccctttgtttcttctcctgggtcaagtcatttgcctaatcagtcccaatgtaggaacctggatacttcagttcaaggtgctgaattcaccgtgcttttcattcaggggaagacagctgcttctcattgggcatcttggcctgcccacttcacgtcactttttgtaaaatccacaccactccaggaatatccattacttaacttcgcctgaaataaacagaaggctcattacacttatcatgggctcacttacttcgcctataatgaaggtgccatggaaatgctagtggatgacgtggtccattttcttagggatgagatagaaaaatggtgtatggctttttaatttaattaaaatttttagtttggtttaaatttacattggtctctttttggttttgttgcctgtacttttgaagtcttactcgtgaactctttactggacaatgaccagaagagttttccctaagtttcttctgatattttgaccatttcagtacatacatttcagtctataattcactttaaattgatttttgtaaacatggtaagaaataggagttcagatttattcttccgcatatgataatgcaactgtcccagtaccaattattgaaaagggtgtgctttccctagtgtatattcttgtcagctttgtcaaagatcagttgcctatgaatgtgtggctttcattttggattctctcgtctgttacatcaatctgtgtgtccacatttatacctgtaccatgctgtattggtgactatggctgtgtaatatattttagagttaggaaatgtgatgctcccagctttgttcatttgcttcagctgaaaaggttgagtccacaattacaaagatggcagccgcccatccccggaggacctccaacccagaaagagatcaggcttcccaccaaccctataaccctggctggagttcctgaaattccaacagggaggaccttcccagtgaggagggatgaatcaaggtcaaatttaaagaaacagtctggccactatcaggcacagcagcagtgctgccttgtgggggacccctcctgctccagaccagctgccctccctggagcccgaaggctagattgtctgagtctacggaaacagagacggtggccgccccaaccacccagaactcggtagtctcaggcacttggcttgctatcttgccactgcttggctggtattccaagcccgtgggacttgagaagtgctgtgatgatggggaccacaggatgaggctgtctggctccctgtgatatggctgtgatgagtggaggaacaccagggctcatgtctcacacagaattggagaaaatgacacaaacacatgtacagtggttttatggcgtgcagtttaataggcaagaacgaaggaagagctccccatactgagacagagggaggggggctccaaagccaaaagaggaaacccggagtgctgtggataccaatgagttatatgaagaaactggagggggcggtgtctgatttgcatagggttcaggcgattggttcgaccaggcatgtcatttatgtggcccacggaaaaactggccctcccacctagcctttgaatatgcacgtgccggacaccctgatttcctacactcatggggatatatgggggtggccatatcgccaggcacaggtggggacaagggccagaagagggcgggaatcgctatgtttgggtggacccagtttctaatggccggcatctgcagatcaaggttaccggagaactctaaaagccggggctttcctgctagacaagactcatttctggagctgctttaaaaagaaacaaaacttcccaaggaccccttttcctccctgtctgcccaaaataatttcttaacaactcgtataacacctgaattcagcccccttactgggggaatgtaccaacggaactcccacctttcctggtttctcaaggctagattgtgtaaacctcctgggtctcggtctgtgtctgagcagctgctctgccaacactccacacagccctgtgtactaggcccaaggccgccgtgactcagcccatgggaggatctcctgatttcttggttgcaaagatccatgggagaaaaatggtttctggggcggggtcacacactcatggcttctcttggctgtgcaagaaggttcctttggctctgttccaatatagcgtggttcatcacccacccctgttttctttgttctcctgagtcaagttgtttgcctagtcagtcccaatgtgagaacctgaatatttcagttcacgtgcttatcgtgaaattcactgagactttaattcagtggaaggcagcctcttctaattggccatcttggcccgccccctccacgtcacctcccataaaatggccacgctctccagggacgatgccattatatatctttacgtgaaaccgacagaacacttattacactttttgtgagctcatttacttcacttataatgaacatggccatggaaatgctagtggagaaagtggtcgattttctgatggatgtgataaaaaaatggtttgccgaccaattaatgacatatgtctcaaaactagtaacgagacccttaatcgctgggttgaagtttctaatcaagaagatgctcatctatgtattcaacaaagcagcttcccttgcttctgaaatgcttccaaacaacatctcatatttcctgaagaagataatgcctggacaagcagcacaagtcattcaggtttactttcagctcataaatccagcaggatattcgcacaattgttgggaaaccttatcagttcatgagtcgtgcatgtttcctttaatttcaggaggaagagggtaatctggaagagtttcctgacctactctgctgctgtgattaaacaaccaccaggaaattttgatgacactgttctcctgagctcctccctttcctcggggaagaaaagcattgaaactacaaaaataaagtgttatttggctggagtgaggtctcatgtctgcttatgcggtggctcgctgctcagaacagggtgagtctctgagttgtacgctgaggaggggaggctgtcaatctagaaaaaacccattgcatgggacacctccatggggtctggggggctgaggatgaggagctggactggatctagggaaggaggaggtttcagagggtgaaattctggcagtaaatcctgggggtgtttgaaaacttcctccctcagaaggagaagactcagggaggaataaggacaaaccatgggtcccttgaggggcatttactaacttaagaggactttatcgggaagcagagtgacaatggcctccttgaggactgaggcccctggataaatgaggcccagatccagatccagtccatgggagatgagaccttcaagggacatatttttgttgggacagaggaaaagtgcagctctgcagctgcagaggaagccttggcagtgtgaaagcgaccttggagggggccctgtgcgttctgaatgcttctgaggtccatcccctgtccccgcctctttttctggattttttgggctccatggtctccgccatcttctgagcgctccacgctgccaccttcagttttctcttctgggctccaaatactccaaaatctttcatatctgtgcccctacccctgtttttagcatgtgttgggactccaggtccctgaaggtttctggcctgaaatccacctccccagcggtgtggattctgctctagagaccccgcacttggcaaggttcccaggcccctgggggacaaccgagtggtatgtgcacttcagggctccacactcggcaaggtctttcaagcccttggggttccctcctcagttttcttcacatgtctgggatgtagtcactctataaatgccgggatgtgatccccaccccagtgattttttttagttccatgagtgttgctatctgaatagtcatcctgagagtgatgggaccttttgaatttgcagcaagttttagattagtgtgagtggcctgagatcgcaaaactggggctagcattggatgtgaggttaggctggtggaaaaatttgcccagaacctgaggagtgtgggctcactgcaggtggttaggatcagcacagaattgcaaggatgtatagctttggggtaaagaataacatggttcagaagtacatgtattagtcttttcatgcattgctataaagaattacctgagactgggtaattaattataaaaactcaggtttaattggctcatggttccacaggctgtacaaaaaggatgatgctggccatcagctcaacttctggggaggcgtcagaaaacttagagtcatggcaaaaagcacaagggaatcaggctcatcctccatggccagagctggagctagtggtaggagaggtgctgcacacttttgaacaatcagatctttttagaactctatcaccagacagcacctagaggatggtgctaaattattcatgaaatatccacccatatgatccactcaattctcaccggcccaaccaggaccacctccaccattggggattacaattacacatgagatgtgggtggggacacagatccaaactcgatcagtgggcatcttggactgggtctactatagaagaagaaccaggagctgactatcatccttaagactgcccatgatggccaggcagggtggctcatgcctgtaatcccagcactttgggaagccaaggtgggtgaatcccctgaggtcaggagtttgagaccagcctcgccaacatggtgaaaccctgcctctactaaaaacacaaaaaattagatgggtgttgtgccagacgcctgtaatcacagctactccagaggctgaggcatgagaattgcttgaacctgggaggcggaggtggcggtgagccccaatcgcactgctacactccagcatgggcaacaataccaaaacatcgtctcaaaaaaaaaaaaaaaaaaaaaaaaggctgcccatgaccactgccccagtgagagggacaccagcatggctaagatcaagtgctggacattcttcatgggtcagacattaaagcaggccacactgttacagagatgggctccattcatagcaacaaagtggtgagaagatgtgggaatggcagaggccagcactttgccatcaatgcaaggtgggcataaggagctggcaccagtgccagagtgcatcaggggaggactgctttgcaatatctagcacttacctcttagagtatgtttcattagggacaacagatataaatggcagacaagtgagtcccttcagtaacaggaaatagaaatcatcaagaggaacagaaacagatgtcagcagccctcatataaagtcatcatccttcatccagttaaaacctgagacagttctcacataagaaggtctaattcaaaaagagactgggttctcatgaggcaggttcatgcaaaaccaagggaagtatacaactttgggattctccagcttcccttggaaaagacctacaatcatttgcttaggtaactgagcactgaacaaaggtgagtattgttatctttcagaagctgttggccatgaaggtcttgctggcataaaacccatggttggaaacatcaccatgacccctgttagagtaatggcctaagggcaagggtcaggaaattgatgtattccttgccaacttctgcgagacgagtgttggtccactcatctctttcacggaattcaccagtctggtatcttcaaaatccagaaggatgatggcagatggcaggaaactaatgcaaacaccatcagttgtacctccactgtagcagcagtaatggatgttatctcttcattgtaatatccagggagggagaagatgacattattctcaatattctaaacaccctgtgtgtacagcctctgtgatattttttgtaatatccgtgtgggagagaattatattactcctaatatctcaggggttgtgccccctctgtgacaatgttcctaacacccaggaggggataggatgatatcacttttagcatcacagggggtgtacaccccactgtaatattgttcataatatccgggggggagagaatgatattactcccaatatcgcaaagactgtacaccaacctgtgatattatttgtaatatccataagaggaagaataatattactcccaatgtcacaggaagtgtacacccttctgtgatattgttcaaaagatccagttagggaggggatgatattactctcaatatcttaaacaccctgtaggtaagccctctgtgatattcctcataatatccagagggagaggatgatattactcccaatattgcatgaagtctacaccccacctgtgatattgttcctaatatccaggatgggagaggatgatattactcccaatgtcgcaggggatgtacaccttccctgtaatattgttcgtaatatctagaaaaggagaggataatattactttcaacatcgcagggggtgtacaccttccttgttatattgttgctaatatccagggaaaaagaagatgacattaccaccactattgcagaaggtgtacacccccccttgatatagttcctaatatccagaaaaggagaggagatattactccaaatattgcaagaggtgtacattcccctgtaatatttttcctaacattcaggaagaaagagagtgatattgcccttaatattgaagggagtgtgccccccccgtgatattgtttctaatatccaagaaatgaaaggatgatattactcccaatatcacaggggctgtacagccccctcccatgatattgttcccaacatcggggggggggtgaaatagtattattcccagtatcacaataggtgtacacacctgtcgtgatattgttcctaatacccatgggggaaaggacgatattattcttaatatctcagagggatgtacaccctccctgtgatattgttcctaatatccggggtgggagaggatgatattacccccaaaatctcaaagggtgtacacccctcttgtgatattgttcctaatatccagggtggagaggataatattattcccaatatccaggaaaggaaacgatgatgttactgtgaatattccagggggtgtcctcccctctgtgatattgttcctaatatccaggttggggagattatgatatttctccaaatatcacaaggggtgtacaccaaccctgtgttattgttcctaatatcgatggggggagaggacgatattactcccaatatcacagggggtgtacaccacctttatgatattgttcctaatatccatgaagaaagaggatgatattactttcaatatcgcaggggatgtacactccccctgtgatattgttagtaatacctaggagaagaaagtgtgatattactcccaatatcgcaggggatgtacacgcttcctgtgatattgttcctaatatttagggggaaaggggatgatattactcccaatatcgaatggtgtgtacacccccccgtgattctttttttttttttttttttttttttgagatggagtcttgctctgccgcccagactggcgtgcaatggcgcaatctcggctcactgcaacatttgcctcccaggttcgcacgattctcctgcctcagccttcggagtagctgggattataggcagctgtcaccataccaggctaatttttgtatttttagtagagttggggtttcaccatgttggtcaggctggtcttgaattcctgacctcaaataatccacccaccttggcctcccaaagtcctgggattacaggcataactttccctgtgatattcttcctaatattcaggaagaaagaggatgatattgctcccaatatcgcagagagtgtgcactcctcctgtgatatggttcttaatattcagaggaggagaggatgatattactttctatattgcagaaggtgtacacctccctcgtgatgtctttcctaatatccagtgggggagaggttattagtctcaaaatcacagaaggtgtaaacccccatttgatattgttcctaatattcaggggtggggagagaaaggtattactcctagtatttcagggcatgaacacccccaccgtgatatcattcctaatatccagaaggggaggcaatgatatttctcctaatatcacaaagggtgtacaccccttctgtgatattgtaaatattctgtgtgtacacccccctgtgttatagtctgtaatatccgggtgggggagagggtgatatttctccccatattgtaggggatgtacacccttctgtgatatggttcgttatatccagggaagaaaaaggtaatattgctgcccatattgtggagagtgtacacccccatgtaatatggttcgtaatatccaggagtggagagggtgatactgctccttacatcgaggaaggtgtacaccttattgttatatgattcgcaatatccaggggaggagagagtgatattgctccccatgtcgcagggggtgtaaaccctccgtgatatgattggtaatatccaggaaaggaaagggtgatatttctccccatatcgcgggggacgtacatcctcctgtgatatggttcgtaatatccaggaggaaagaggaaaatattgctcttcataacccgaggggtgtacaacccctgtgatatggttcgtaatacccagaagtgtacacccctctgtgatatggtttgtaatatccagggggttagagggtgatattgctccccatatcgcagtgggggtacacccccctggattggttcataatattcatggggggagaaatttacatttatcctcatatcagggggggtgtacaccccccgtgatatggttcgtaatatccaggggaagaaagggtgatattgctccttatatcgcggaaggatcaccctcccctgtgatatggttcataatacccagacgggaagagggtgatattgttcttcataaagcgaagggtgtacagccccctgtgatatggttcataatatgcaaaaggggagagggtgatattgctccccatatcacggagggtgtactcccttctttgatatggttcgtaatatccaggggtgtagatggtgatatagctcgccctattggggagggtgttcacccctctgtgatattgttcgtaatgtccagggaaagagaggatgatattactcccaatatcgcagaaggtttacaccactctgtgatattgttcataatatccagggaaggagaagacgatattactcccaatatggcagggggtgtagaactcctgtgatattgtttgtaatatccaggcaaggagaggatattactctcaatatcgcagaaggtttacacccctatgtgatactgttcatgatatccagggaaaaagaggatattactccctatatcacaaagggtgtacacccctttgtgatattttttgtaatatccaggggagagaggataatattactctcaatatcagaaggggtgaaaaccctcctgtgtcattgttcataatatttagggaaggagagagtgatattactccaaatatcacagtgggtgtacacccccctatgatattgttcctaatttccagaaggggagatatgatattattgccaatatcgcagaaggtgtacaccttactctgacattgtttgtaatatccagatggggaaatgatgatattactcctaatatcacagggggtgtacacccccttgttttattgtttgtaatattcaggggaagagacgattatattactcccaatatcgcagggtgtgtacaacactctatgatattgttcataatatccaggggaggagaggaagtgtacacccccccgtgatattgttcgtaatatccagaggtagagaggatgatattactcccaatattgcaggtggtgtacacctttctgtgatattgtcatgatattaagaaggggagaggatgatattactaacaatatcacaaaaactgtacactccctgtgatattgttcataatatccagaagaagggaggatgatattattctgaatctcgcagaagatatacaccaccctgtgatatggttcataatatcctaggggaaagaggatgacataactgtcaatatcgcagggggtgtacaattccctgtgatattgttcacaatattcagagggaaaaaggataatattactttcaatatcgcaggcggtgtacacattactgtgttattgtttataatatccggaatgagagaaaattttctcccaatatcacaggaggtgtacactcccctgtgatattgttcgtaatatccagggaggggagaggatactattactcccaacatctcagggagtgtaggccccccctttgatattgttcctaatattcggaagtggagaagatgatattacttccaaaatcgcagggggtgtacactccctctgtaatattgtttctaatattcatgagtggaaagaaagatattactcccagtattgcaggggacatacaccacactgtgatcttgttcacaatattcgggggggagaggatgatattactcccaatatcaaagtaggtgtacacccccttctgatattgatcgtaatatccagaattaaagatgataacgttactcccaatattgcagggggtgtacatttttgaatactgttcataatattaagagggggaggggatgatatctgtcccaatatcgcaaagtgtgtacacctcctgtgacattgtcccaaatatccagaggaaaaaaggatgttattactcttaatatctcagagagtgtacacctccctgtgatattgtttgtaacatccagaagaaagaggctgatattactcttaatatcgcagggggtgtacacccccgccccgggatattattcgtaatatccagggggaagtggaatgttcagaatgggagaggatgatattacttgcaatatcatagtgggtgtacaccccactgtgatattgtttgtaatatccgggaaaggagaaaatgacattcctccccatatggcaggggctgtacaccacctatcatattgttcaaaatatccagaaggggagaggatatgtctccaagtatcacagggggtgtacaccccgctgtaatattcttcctaatatccagggtgtgagaggataatagtactcccaatatcccagggcatgtacaccccccttgtgatgttgttcctaaaattcatggggagaaagaatattactcccaatatcacagggggtgtacatacactctgtaatattgttgccaatatgcagcaggagagaggatgatattactcccaatatcacaggggctgtacaccccgctgggatattgtttctaatatcaagggggaaaaaggatgatattactcccaatgtcgcagggtgtgtacttcctctttgtgacattgttcctaatatccaggagagaagagggtgacattccttccaaaactgaaaggggtgtacacaccctttgagatattgtctttaatatccagaacgaaacaggatgatataactcctaatactgcaggggggtacaccctctctgtgatactgtttctaatatccaggaggggaaagaaaaatattaatcccaatatcacagggggtgtacattccccctttaatattgttcctaatatccaggaagacacaggatgatactatttccagcagcacagggcatgtacacccctttgtgatattgttcctaatatccaggaaaagagaggatgatattactgtcaatattgcagggcgtatacactggttctgtgatattgtttctaatatccgggggtggagaaaatgatattactcccaatattccagcgggtgtacacccgttctatgatattgttcctaatatctgggggagagagaatgatattattgtcaatatcacaggggatgtacagattccctgtgatattgtttctaatattcacagggggagaagggtataatactcccgatatcgcagggggtgtacactccccctgtgaagttgttcctaatatccagggattgagagaatgatattactcccaatatcacaggcggtgtaaaccccctgtgtgatattgttcctaacatccagaggaaaagatgatgatattattttcaatatcacagggggtgtacgcatccctgtgatattgtttctaatatccaggggaggagaggatgatattattgttaatatcgcagggggtgtaccccaccctgtgatactgttcctaatatccggggtggaagaggataatattgctcccaatatcgcaaagggtgtacaaccttcctgagatattggtcctaatatccagggagggagaggatgatattactttcaatatcacagggagtttacacaacccctgcgatattgttcctaatatccagcggaagaagagttaggataatactattttcaaaattgctgggtctgtaccccctccccgtgatattgtttctaatatccaggaggggagaaagtaatatgactcccaatatcttagaagatgtacaccctccccataatattatttcttacatccagggggtagaggatgattttgctttcaatatcacagagggagtaaacctttccggtgatattgtttttaatatttaaaaagagagaagataaaattactcccaatacaaaggggatgtattgtgtactcccccctctgatattcttttttaatatccagatggagagaggatgatattactttcaatattgcatgggatgtataaatcccctgtgttattgttctgaatatacaggtggggagagtatgatattactccaaatatcgcagggggttctttccccctgtgatattgttcctaacattcagggagggagaggatgatattactcttaatattgcagggggtgtacccacgcctatgatattgttcctaatatccagagggggagaggatgatctaactcagaatatgacaaggggtgtacacacagcctgtgatatggttcctaatatacaggggagaaggggataatatttctcccaatatcgcagggggtgtacaaccccctgtgatactgttcctaatatacagaaggggacagcatgatattgttcctaatatcgcaggaggtgtacaacgccctgtgatattgttcctaatatccagggcgggagaggatgatattaccctcaatatcgcagggggtgtgcactttccctgttatattgttcctatgatccgggtggggggaaatgacattagtcccaatatcgcaggatgtgtgcaccgctcccccgtgatattgttcctaatatcaagggggagagaggaggatattactcccaatatcgcaagggatgtacatcctccatgcgatattgttcgtaatattcaggaggagagaggatgatattactcttaatatcgcagaaagtggacacccaccctgtgatgttcttcataatatccagggaagcagacgattatatgactttcaatatcgctgggagtgtacatcccttttgggatattgtttctaatatccaggaagggagaggattatattactctcagtattgcaggcagtgtacaccttttttgtgatattgttcctaatattcagaaagggaaaggatgatattactcccaatattgcaggtggtgtatatccccctctgatattgttccttatatcaaggaagagaaagaataatattactcccaatatcaaagacagtgtagacccctcctgtgatattgtatttaatatccatggggaaagaggatgatgttactcccaatatcgcagggggtttacacccacactgtgatattattcctaaaatccagtggaggagaaaataatattgctcccaatattgcagggtgtatacaggccctcccccgttatattgctcctaatatccagcggtggagaggatattactttcaatttgtgtagggagtgtatacccccctgtgatatttttctaatatcaaggatgggaaaggatgacattactcccaatatcgcaggaggtgtacacgccctgtgatattgttcctaatatctagggaaggagaggatgatattactttcaatattgcaggagctgtacaccctctgtggtattgttcttaatatttaggttgggagaaaatgatatgagtccaaatatcgcagaaggcatacacacttccaataacattgttcttaatatccgggggagagggtgatattactcccaaaatctctggggggtgtacacccccttctgatatttttcctaatatccagggaaggaaacgatgatattactataaatattccaaggagtgtacaccttcctaatatcctaatattgttcctaatatccaggggtgggagaggattatattactcccgatatcgcagtgggtgtacacccctcctgtgatattgtttctaatatccaagctaggagaaaatgatatcactctcaataccacagggggtgtacaccttccgcatcatattgttcctaatattcagagggaaagaagatgaagttactttcaatatcggaggggttgtacacaacccctgtgatattgctgctagtatccaggaagaaaggggattatgttactccccttatagcagggggtatacacctcccctgtaatattgttcctaatatcaaggctgggatatacgtggggggaaggatgatattactcccaatatcgcaggggttatacaaccttctgtgatattgctcctagtaaccagggcagaagaagatgatattactcctaatatcgcaggaggtgtacactcccccattatgttgttcccaatatgcagaaaaggagaggatgacattattgccagtatcgcagggtgtgtacaccacccctgtaatattgttccaaatatttagggggagagaggatgatattactcccaacatcgcagggggtgtacacacatcccctgtaatatagttcttaaaatctaggggaaaaggggatcttatttctctaaatattgcagagggtgtacactccccggtgatattgttcctaatagccgggagggagataattaaattactttcaatatctcagagagtgtacatcgcccttgcgatattgttcctaatatccagagcaaaagagaatgatattactcccaatatcttaggagtgtacatttaacctgtaatattgttcctaatatccagggggaagagaatagtattactgccaatatcgtaggggttgtacaccttttctgtgatattgttgcaaatatttagtagagggaaagaatattactcgcaatatcacagggaatgtatacttcccctgtgatattgttctgatatccagaaaaagagagggtaatattactcccaatattgcagggggtgtacaccccccttgtgatattgatcctaatataaaggaaggaagaggatattactcctcatatagaaggggttgtccaccccccttgtgatattattcctaatattcagggaagcagaggatgatattattttcaatatcacagagggtgtgcagtccacctgtgatattgttcttaatattcggggggagaggatgttattatgcctgatatcgcagtagaggtacacccctcaagtgatactgttcctaataaccaggggtgaagaggatgatattactcccaatatcgcaggtggtgtacacccccccatgatggtttctaatatacagagggggagaggaaaatattactcccaaaatcgctggaggtctacaccccccttgtgatattgttcctaatatccaggaaaggaaacgatgatattactgtgaatattccagggggtgtacacccgctttgtaatattgttcctcatatccagggtgtggagaggattatattactcccagtatcgcagggggtgcacgacgcccctgtgatattgtttttcatatccaggaggggagattattatcaatatggcaaggggtgaacaccccctgtgatattgtacttaatagttaggttggcagaaaatgatattagtctcgatatcgcagggggtgtgcactccgcctggtgatattgcttttaatatcaagggggagaaaatggcattactcccaatatcgcagggggtgtacaccgctcatgtgatattgttcctaatatccaggtggagagaacataatattactcccaatatcgcacaaggtgtacacccctcctgtgatatggttcctaatatccatgggaggagatgatgatattactcccaatatcacaggggatgtacaccacccttgtgatattgttcctaatatccagggaagaaaacgatgatattattgtgaatattacagggagtgtacacactccctgtgatattgtttttgatatacagggtgggagaggatgatattactcccaatatcacataaggtgtacaccccccgtgatattgttctaaatatttcggtggggagaaaatgatattagtctccatatcacagggggtgtgtgctcctcaggtgatattgtttttaatatcaagagggggaggagattatattactttcattatcacagggggtgtacacccctcctgtgatattgttccttatatccaggcgaggggaaaataatattactctcaatatcgcaggaggtgtacacaccccatgtgatattgttcctaatattaagggggaaagaagataatattactttcaatatcacagggtttgtactcctttcttgtgatatagtttttagtatccagggggaaagagcatgatattactcccattgtagcaaggggtgtacacacctcctgtgatattgttcctaatatccagaagtggtgaggatgatattactcccaatatcgcagggggtatacaccccacctatgatattatttctaatatccatgggaaaagagtatgatattacacccaatgtcgcagagggtgtgtatttttcctgtgatattgtttctaatattcaggcggggagaagatgatattactctcaatatagcagaaattgtacatccccgctgtgatattcttcataataatcagggaaaaagaggatgatattactaccaatattgcaggggggttacacttcccctatggtagtgttcctaatatccaggaagaaagaggatgatattaatcccattatccaggaagtgtacacccaccctgtcatgttgttcctaatatccagcagggaagaggatgatattacaccccccccccgtgatattctccttaatatccaggaggggagaggctgatattactggatatatagcaggggtgttcataccttctgtgatattgttcctaatatccagaaaaggagaggatgatattacttccaatatcgcagaaggtgtacacctccctgtgatattgatcctgacattcagaaggggagaggatgatattactcaaaataccgcagggcatgtgcattcccttgtgatattgttcctaatacccagaagggaacaggataatattactttcaatatcgcagggagtgcacacccccctttggtatggttcttaatatccagaaggaaagagggtgctattactttccatattgcaaggggtgtacaccccactgtggtatggttcataatatccaggcagggagagggtgctattactccccacagtgcggggcatgtacaccctgctgcggtacggttcctaatatccagggggagagaggatgctatgactccctatatcgcggggtgtgtacacccctgtgtggtatgttttgtattctccaggaacggagagggtgttgttacccctcatatcgctggaaatgtacactcccctgtggtatggttcgtaatatccaggggattgagggtactgttacccccatactccccatatcgtggggggagtgcacctccctgtggtatggttcgaaatatccagggtaagagagggtgctattattccccattttgcaggaggcgtacacccccctatggtatggttcgtaatatccggggtgaggggatgctatcaaaagaagagagaaagagaccccccatattgttctatattattttatactcagtacctgttttaagaagaaacaaggaagtgaaaccaaaagcaggcagcccggcgccaggcaccagacccaaaaccagacccgaaaccaggcctgggcctgcctgaccttagcctgatagttaaaattcaacccatgacctagcaaccaatgttatccatagattccagacattgtatggaaggacattgtgaaatttcttgttctgtgctgtttcactctgattaccggtgcctgcagcccctgtcacatacccactagattgctcaatcaatcatggccctttcatgtaagatctttagtgttgtgagcccttaaaaaggacagaaattgtgcactcaacaagctcggattttgagacgctagtctttcgatgcttccagctgattaaaagccacttccttcactacctcggtgtctgtggggttttgtccgcgactcctcctgctacactatgactccccatatcaaggggggtgtacacccccctgtggttcgtaatatccagcaggggaaaaggtgctattactccccatattgcagggagtgtacacccccttgtagtatggatcgtaaaatcaaggggggagggaaggtgtaattatccccatatctcagggggtgtacacccctttgtggtaaagtttgtaatatccagggatattacagggatattatccccaaattaatacttttataatttcttatgcctgcctttactgcaatctctgaacataaattgtgaagatttcatggacatttatcacttccccaatcaatacttttataatttcctatgcctgtctttactttaatctcttaatctcatcatctttgtgagctgaggatgtatgtcgcctcaggaccctgtgatgattgcattaactccacaaattgtttataaaacatgtgtatttgaacaatatgaaatctgggcaccctgaaaaagaacaggataagagcgatgttcagcgaacaagggagataagcataaggtctgactgcctgtggggctgggcagaacagagtcacatttttcttattgcagaaaatgagtaggagaaatatcactgggaagggaacgcattcctaggggaggcctatggacggccgctctgggggtgtatcccttatgtggttgaagataagggatgaaatacaccctggtcccctgcagtgccctcaggcttgctaggattagaaattccagcctggcgaattctagtcagaccagttctctgctcttgaaccccgtttcctgttaagatgtttatcaatgacaatgcgtgcacagcaggacatggaacctcaatagtaattccattttctccctggccttgtgaccttgctaggcccttctgcccttgtgatcttttattgccatttgaagcatgtgatctctgtgacccactccctattcgtatccccctccccttttgaagtccctaataaaaacttgctggttttgcagatcaggtggtcatcacagaacctgccgatatgtgatgtcaccccggaggctcagctgtaaaatttctctttcgtactctttcactttatttctcagaccaggtgacacttaaggaaaatagaaaagaacctactttgaaatattgggggctagttcccccaatagacattgttcctaatatccagaaaaaaagaagatgatattactcccaatatcacaggggttgtgaaccccacctgtgatatggttcctaatatccaggaagggagagaatgatattactctccatattgcagggggtgtgcacatccctgtgatattgttcctaatatccaggggaggagagggtgatattactcccaatattgcaagggttgtaaactccaccctgtaatattgctcctaatatttaggatttagggggggagaggataatattactcccaatatcgcaggggatgtatatgccctctttgatattgttcctaatatccagggggggagaggataatattactttccatatcacaaagagtgttcacccccctgtgatattgttcctaatatccaaaaaggaagaggatgatatcaatcccaatatcacaggaagtgtacaccccccccttttatattgtttctaatatccaggggaaatgagggtgatatttctctcaatatagcagaatgggtacactccccctgggatattattcctaatatccaggggaaaaaaagaggttgatattcttcccagtatagcagggaatgaatacaccctttgtgatattgcttctaatatcaaggggaaaagaggatgatatgactcccaatatcacaggggatgtaaacctgtggcgttgttgctaatatcaaggagggaagagtatgatattactcctaatgtcgccgaaggtgcacactttccctgtgatattgttcctaatatccaaaagggaagagaatgatattacccccagtattgcagggtgtacaccacccctgtgatattgctcctaatacccaggaaaaaagagaatgctattacccccaatatctaaggggacgtataccttccctgtgatattgtttctaatatccaagtggggagaggatggttttactctcaatattgcagggagtgtacactccccctgtgatactgtttctaatactcgggctgggagaaatagtattactcccaatatcgcagtgatattgtttccctgtgatattgtttctaatatctagtgggggagataattatattactaccccatacacaggggagggtgtacattcccctgtgatattgtttgtaatatccagggaaggagaggatgttactcccaatatcacaggggttgtacaccccttttttgatattgttcctaatatctggggggcagagaattatattactgtcaatatcacagagtgtgtacaccccctctgttatattactctttatattcagggcggtagaggatgatattactccctatatcacagggggtgttcacccctcctgtgatattgtttataatatctaaggggaaagaggatgatatcactctcaatatcaaaggaaatgtacacctttcctgtgatattgtttttattatataggggggcagaggatgatattaagaacaataccacaggggatgtacacccacgtattgatattgtccctaatatgtatggggaaagaggacagtgtaactcccgatatcgcagagtgtgtacacccccttgtgatattgtttctgatatacacggggagaaaagataatatttcttccaaaattgcagggggtgtacaaccccctgtgatattgtttttaatatccagtgggggagagaatattactcccaatattgcagggcgtgtacacaacccctgtgatattgttcctaatatccagagtaggggaggatgacattactttcaatatcgcaaggggtgtacattcccctgtgatattgctcctaatatccatgaggggagaggatgatattattcctaatatggcaggggctgtacaccttccctgtgatattgtttctaacatccagtgggggagaaaatgatattactccctatatcacagaaggtgtacactttccctgtgatattgttcctaatatccagaaggggagaggataatattactcccaatatcgcaggaagcttacaactcccctgtgatattgtttctaatatccagggaggtagggatgatattactcccaatatcgcaggggatgtacactcccccgtgacattgtttctaataaccagggggtgagaggatgatattacgcttaataccgaagggggtgtacacacccttgtgatattgtgcctaatagccagggggaagaaaattatattaattttaatatttatggggaaaaaggatgatattactcccaatatcacaggggctgtacaccgaccttttgatattgtttttaatatccagaagagaagaggataatattgctcccaatatcagaaaaggtgtaaaccccttctgtgatattggtcctaatatccagggagggagagaataatattactaccaatatcacagaaggtgcccacccccaaggtgatattgctcctaatatccaaagataatagggtgatgttactcccaatatcacaggaggtgttcacaccccttgtgatattgtttctaacgtacagggaagggagaggatgatattattcccaatatcacaggaggtgtatactcctctgtgatattgattttaatattcggggggaaaggatgatattactccctatatcgcagagggtgtacaccctctgtaatattgatcctaatatccagggcgggataggatgatattactcccaatatcgcagaaagtctacacaacccccagtaatattgtttttactatccagggggaagaggatgacattactcccaatttcacagagtgtgtacactcaccatttgatattgtttctaatatctagggggagagaatatattactcccaatatcacaggaattgtacaccacctctgtgacattcttgtgaatatccggggaaaaagagaataatattactcccaatattgcagagcgtgtacacccctccatgatatcgatactaatatttttttaaagaggatgatattactcccattgtcacaggatgtgtacaccccccttgtgaaattgttcataatattctggggggagagcataatattactccccatatcgaaaaaggtgtccaccctccttataatatggttcctaatatccaggatattacttaatccaggatacttgtaataccctaaatatacaattgcttgaacctccacctcccaggttcaagcaattcttctgcctcagcctcccgagtagctgggactacaggggcacaccaccacacccagctaatttttttttcttgtatttttagtagagatggggttttgccatattggccaggctggtctcaaactcctgaccttgtgatctgcccacctcagcctcccaaagtgctgggattataggcgtgacccaccgtgccaagccaggaagaggatgctctatagatttccccaataagagatggctttgcagggccattccaaaatatgtcaaagaaatacatttggggataaaatactttgatttcctttagggaatgttatctattatgtgatgctataccagagtcaggttggagtcggttatcttattgcaacaaagagtctgttccgtcactgttgggatctctattttttcctcttatttcttgagacagggtctcactctgtcacccagtctggagtgcagtggtgcgatcttcattcactgaaacctctgcctcctgtgttcaggtgattctcgtgcctcagccccttaagtaactaggattacaggtgtgcgccaccacacccagctaatttttgtattttcagtagagatggtattttgccctgttggccaggctggtcttgaactcctggcctcgtgtcatctgcccacctcgacctcccaaagtgctgggactgcaaatgtgagctattgtgcccagccaggatctctgttttaatgttagtgctggtcactttgcatgaactccaaagggaagaaatataatgaggtgtgtctgaccccctgccttctcatcgtgacctgaattagtttttcaggtttgcaggggatacccttggacaagaaggggctctattcggttggttggggggattagaattttactttttgtttacaatatttctcctgaaagagttaggggctcacaaggaatttccgcgtgagcaacttatgaggaaagccatctgggaagatatgtgtccttgtgtcactgggatattctcgtttaccccaatgatacggcaatgacgcagggttgtgaaattacagctatgtgtttggggaaaaaagaaagcaggattgtgtgactacgtttccaaacttcacttgcccttagccatagtgagttgggggcctggagattctgttttctttcacaatgatatagatacaattaaatgtatagaaagcaaaaaaataaaaaggtgagtaatgaggaacctctgattcctgagtggccatgtagttacccatggcacagagccacagttactgaaggtaaagtttgctggggaatttagaaatgaatccagctcttggaggagtcagtttactggatgcctaagaaaatgcaaacaaaataagaaaaaagggtaatattcaatcccatagttattgttacctgtcatagctaaagtaaaattaaaacagagtgctggcttcaatcttgatgctacactaagcttagatttcagtgaatgtgagtctcagccactagctcagagccacctcccaaagaccaaatcatgtagggacaatagaaagtacttctgagaattgtggttaccaagaacctagtaactgttggggaggagcaaaacaaagtacagaaaccagagggtacaatctgagtgagactgctatcagcttctggaggagcctttactaaaatgaatgatgagagtaactggatgatgagagtaactaatggatgatgagagtaagcaatgtctttggttttcttttttttttttttttttttttagcagacgtctcactcttgtcgcccaggctggagtgtaatggcatgatctcgcctcactgcaacctccacctcctgggttcaagcaattctcctgtctcagcctcccgagtagctgggactacaggcactcatcaccacacctggctaatttttgtatttttagtattttctggtgagggtccaggtttccggaaacaactcagagacatatgttaagatgttatctttagttttcacagggaaccaaatatgttacgactccaatttccttggctattgttttaagttaccattaccttctcgttgatcaagttgctcatttacttctcaagcctagctagatgcctggaatttcccttgaaggaagtcaagattttcctttatctccatactggctgatggtgatcgagtaagcccctaagaggggtccctgctccatctcgagatgctgctagattctacagtgcctaataaacagctctcgcctggccgacaaagagctgcttgctctctggatagcaattccaaagtgaacagacaacatcctgtttggaagactgccactctgttagaagaagcatcaggaaaacctttcttttgagctatttataactaacagcaattgaccaagtatacttttgtgagtgaaactgacctttctccctgtaagaattctccaaaatttggaaactatttgtgagtatttttacttatggcaatataattattggcacaagctcaatcagattcggttttctttcgtaacaggaaccattggagatactcattactctttgaaggcttacagtggaatgaattcaaatacgacttatttgaggaattgaagttgactttatggagctgataagaatcttcttggagaaaaaaagactgggtatattttcaatatgctttccttttaaggtccctcacctgtggaaagtaaagaatgtcactttctgacaggctcaggaacctcaagttatgtagggatctcaagaagatgggggaattcacccagttcatacaggtgaaattgctgttgcaaagattatgaatatgagagaagtccagcatggctgacttcatctcgtgtctggcctcaggctggctgcccttgctcactcttgggcataggccaagctagccatgggaggaatttagtttatagtttaactttgaagcacggatgataatagtctctccctaaaatgaaccccttccttgctcagggactgaaactacctttgtatgacaaatgaaagcccacaagattaagattatgagaggggcctgaattctgctaaaatgcaggtgtagctgactgataacaagtcattgtcccacagcttgcctttctataatctcttgcttctcaggagtcacatggccagaggtcctgagatttccagtcctgtgacccccacccagagatggacttagtgcatgaggaccattttccacacccctatgatttcatcctcaaacaatcagcagcaaccattccctagccccctgccttccaaattatccataaaaatcctagcctctgagttattagggagattgattaataatcccagtcctaccccttgggttgctctgatttaattaaaccttctctactgcaataccacggactcagtaaattggttttgtctgtgcaatgggcaagaagaacatgttgcatggttatacaggtactacaagcacagtctgatggcaaattattggttttgcttcctgcccttgatgtttctaaacatctagtccaaaattacttgtgaaaggtccagcaaagccaattttaaaagaggctatatggccaatcactattctttctacacattattgcaaataatcaggccacggctgggcacggtggctcatgcctgcaatcccagcactttgggaggctgaggcaggatcacctgaaatcaggagttcaagaccagcctaggcaacatgataaaaccctgtctctactaaaaatacaaaattagccaggcatggtggcatgcacctgtaatcccagctacttgggagactgagggaggagaatcacttgaacctgggaggcagagattgcagtgagctgagatcacaccactgcactccagcctgggcaatagagtgagactttgtctcaaataataataataataatcagaccaagtataatgaaattaaaatttattttgcaaataaattggtcctactacaatttatccttcatagaaatgtggaaactgaagataaaaaaaattaggtttcagaagaaaactatactacacctgttattagattctagccctaaacattgtttttgaggtttttattatttacctgcaatttggtctaaattctgaattatttcctgactacaagtatccaaggaataaatgggttttctttttctttatgatagttttagttggcttctaatgcaacaacaatttttattgtaatcctgtgtgcattctattcctactattcaaattattaatgttatagatctttcattgtagtacttctgaattaaccaaaatcacagtattctgaagatgattctacaaagcctgctgtttctacaaaggctgctgatgatttctacaaagcctgctgtagtgttgctgtggcctctgcttaaaaaagtagaaaacacattgatgcagcatgttcaccccaacctccctgcctaaaggctcagggaccatcttggaagaggaaggcgcgtgagattgtaagagccgaattagggggatggagtgtggagaataaggacacttcatcttggatgctcacctgccaaattgacttctgatgaaagccagctccagaaatgtgcctacagttactactttcacctaaaccctgcccttagtcaaatccttctcttcttctaagcaatcaacttcaattccttgtataacccacagtataaaagggcttttataccattctatcctattgcatgtaagccttgggtctgggaggtaacagtgtgggattccaccatctcatctccctgccacccaaacatgcctgctcttctttaagcaatattaaatgtttgtacttcagaaatttgatttgtcagcctcttcttcagactctcagcttctttggcctttgggagtaaatttgcataggcctgctcaaaacaggatgttctgggggtttgggggtgttgttttgttttgttttttgttttgtttagagacagggtctcactctgtcacccaggttggagtgcagtggtgcaatcatggcacactgcagcctcaaactcctaggctcaagcaatccccccaccttggcctcccaaagttctgggattacaagcataagccaccatgcccagccctggacttttctttaaagacatttacacagtgtaggaattactgtgggtgcactgctcaggtccccttctccaggatgctcattcctacctcatagatgattttcctgcagagatttgacctcagctgaagggcagtcacctggtccaggtggttgctattcacctccttcctgagaacagccaacagccagggacacgctagcacagagatataagagcgaccaaggtgaggccccttctgtgctgcggtgcatgctccagagcctccctgggatcagacttaagagggtctccagccagatctggtcttcgctgctttcctcgagctccccagcgcactcctgcaatgcatcttttttttttttttttttttttttgagacggagtttcactcttgttgcccaggctggaatgcaatggcgcaatctcagctcaccacaacctctgcctcgcgggttcaagtgattctccttcctcagcctcccaagtacctgggattacaggcatgcaccaccacgcccagctaattttgtatttttagtagaaacgggtttctccatgttggtcaggctggtttcgaactcctgacctcagttgatcctcctgcctcagccttccaaagtgctgggattacaggtgtgagccactgtgcctggcccaatgcacctcttgaatcacctcctcatgctttgcttttagagaacatgatccccaacatgtgattccagcaaagattctagaaagccaaccgtgacaatcacttctgggtttagatgacccccccccaccacaagatggcagtgagcacctcatcacagaggtgctgatggtctgcagcaccgcgccaggccagaacgtgccttttacagaagaaaataacccagtagctgactaggatggtgaggagggctggtgagcactgcggtagtgagagggacactagcatcactgagatgcaagtgatggtcatttttcataggtcaaagctcaaagcaggggacagttacagggcagggcttcatagcaccagtgtgatgaaagtatctgggagtggctaaggccagcactatgccatgggaagcaaggtgggcctgaggaggaggcagcagcgtcagcctgcaacaagtgggggctgccctgcagagacctaagagtcatgttatagagcacagtgtctgtaaggccaagaagtgtggacagccaagtgtgtcaattactagacatactcaagaggagcaggaagggcagggcatggtggctcatgcctgtaatcccagctacttgggagactgaggaaggagaatcgcttgaacccgggaggtgaaaattgcaatgagccgagatttcgccactgcactccagcctgtgtgatgggagcgggactccatctcaaaacaaaaaaagaaaaaggaaaaagaaaaaaagaaaaacctaggtatacttctcaagcaaataaaaataatcaaaaccaatatcatgcccgggcacaaatttcatatatataacagatttaaatatatgagggtgattatcctctcatatctccatttttttttgtttttccatttttttctttactaaaaaaagttaatgccaatgacacacaatttttttttttttttttttttttgagatggagtctcacttcttcgccctggctggagtgcaatggcgtgatctcgactcactgcaaagtctgcctcctgggttcaagcaattctcctgcctcagcctcccaagtagctgggaccacaggagtgagccaccacacccagctaatttttgtatttttaatagagacggggtttcaccatattggccaggctggtctcaaactcctgatctcaaataatctgcccgcctcggcctcccaagattctgggattataggcgttgagccactgcgccccgcctatgtatgattttttttttaattttattttcataagtttttggggaacaggtggtattttgttacatgagtaatttctttagttgtgatttgtgagattttggttcacccatcaactgagaagtatacactgaacccaatttgtggtcttttatccctcacccccttcccaccctttcccccggagtccctgaagtccattgtatcattcttatgcctttgcatcttcatagcttagctcttgaacccttactttctgtttgagggagaagacatatcatctacaagtagatactgtgtaaacattccattgcatgactatcccataacttatttattatttgtgtttggttatttgctgctatgtaacaaccccactcccaactaaatggtgtgacaattccatgattctgtggatcaaaaattctgaaaagtcaaacccaaggagttttgtctctgctccatgatgctaaagcctccgcaggggtgaggcgaatggctcagggtgactgaaaagctcagggttggaacagctggggatgaggcctctatgtataagatgattcttcactcacaggtctgaaactatggtggggacagccagaaggctcggctcagctgggacagtcacctgagccctacacatgacctctccaacatggtgatcctgaagcagttgggtttcttacacagcatcacacttttcttttttttttttttttttgagatgaaatattgctctatcacccaggctggagtgcagtggcacgatctcagctcactgcagcctccgcctaccaggttcaagcgattctcctgctccagcctcccaagttgctgggattgcaggcgcctgccaccaagcccagctaatttttgtatttttagtagagacggggtttcaccttgttggccaggctagtcttgacctcttgacctcaggcgatccgcctgcctcggcctcccaaagtgctgggattacaggcatgagccaccgcgcccggccaaagctcacacttcttatgattcagccttagatgtcacatcagttcattttccccacacttattagtgttagaagtcacaagcccacccatactcaggggactggcacacagaccccactctcaatggaaggggtgggacaccaccattcctgctgatgggcatttgggtaacttcctgtttgaagctattaagattgggctgctgtggccgggcgcagtggctcacgcctctaatcccagcactttgggaggccgaggcgggcggatcacgaagtcaggagatcgagaccatcctggctaacacggtgaaaccccgtctttactaaaaataccaaaaaaaaaaaaaattagctgggcatggtagcgggcgcctgtagtcccagctactcgggaggctgaggcaggagaacggcgtgaacccgggaggcggagcttgcagtgagccgagattgtgccactgcactccagcctaggcgacagagcaagactccgtctccaaaaaaaaaaaaaaagattgggctgctgtgactattctagtaggtgtctttggtgagcgcctacacgtgtttctctttttctctttagtatatgcccaggaggggaactgctggctcccagataccgtatgttcagggtcacacacacttccacagggttttccaaagcccttgtaccagcacgcactcccagcacctgtgtgactgctccagctgtcccacagtctcatcagttctattgctgatattttcattttagcttaagttatatttaataggaaaattaccgttgcctctgccccccgttcctgcctgtaggagtttctcgtagctgttgctacaggtggccacaaatctgtcacttaaacccacacaaattgatgtccttatggctttggagtcagaagtgtcaactgaaggtactagcagggctgtactgacctggtggcctcagggagcatctgtgctgcttctccaccttctagaggctgctgcatccctcgctccagccccttcctgacaccactcaccctcctacttctgttatcacatcctcaccttctctgtgttcagggctccctctgtctctctcttgcaagcacacttgggattccattgagggccacccacataacccaggagaatttctccacctcaatatccttaacaactgcagagcccttttgccataaaagttaccattcacgggttccagggattgtgacatgggtagctttaggagtgattattcctgcctgtctcccgctcaccagaacttggactttctctctcaacaggagccccctgtgtgggaatagcctgtctcaacgacgccctctataaggacctgcttcctcaaaggacctcatagtcgggtcctgcccctcagtgtccagtctgccttggctggaggggctgcaggggtgtgttggcgccacctggtggagacagggcatcacagcaggtgggagcccagtagaagcacaaccaaaacatgggtaatgtttaaaattttctggctaagcgctgtggctcacgcctgtaattccagcactttgggaggccgaggtgggtggatcacatgaggacgggagtttgagaccagcctggccaacatggtgaaacatcccctctactaaaaaatacagaaaaattagctggacatgtggcgcgctcctgtaatcccagctactcgagaggctgagacacgagaatcgcttcaaccccggaggggttgccgagatcgcgccactgcactccaggctgggcgatagagcgagactctgtctcaaaaaaaaaaaaagaagaggggaggcgaggggaggggaggggaaaagggggaatttgtttggagctgagacatccatcttctcctgacctcagatatttgcactcctggttatgaagccttcacacttggactgaatacaccaccagctttcccgatttccagcgtgcaaatggcagatcgtgagacttctcagcttccataattacatgagccaatttatatatataaattgggtcctccagaaaaacagaataaattatatatataattatacgcataacttaattaaattatacgtataacttagctatatatataatttattctgtttttctgaagaaccctactgacacaaatgttgagcatcttttcatgtgcttattggcttaataacttgtacatcttctttggggaaatgtctattcaagttctttgcccattttgtaactgaactattaatatttgtctttacattgttgagttgtaaaagttccttatatattctagatactagagccttatcagatatatttctgcaactattttctcctaatatataggttgtgtttttattttctttttctttttttttttattgagacagtctcactctgtcacccaggctggagtgcagtggcatgatcttggctcactgcagactcgacctgccaggctcaagcaattctcccacttcagcctcctgagtagctgaggttataggcacttgccatcgcacccagctaatttttgtattttttagtagagccgaggtttcgccatgttgcctaggttggtcttgaactccctgcctcaaagcgatctgtcagcctcagtctccctaagtgctggaagtacaggtgtgagccacagtgcccggccatctattttcaatagtgttttttgatgtacacaggtttggaattttgataatgttcaattcatccatttttttttttttttttttggttctttctactggaccaccactcttgagccctctaatccaacctccacgcggcagccagagggagctctctaaatgtaattactctttccctgctccacctgctcaaaacagtgtcacatttgtgatttaaaacagtatttctcaaacctaatttgcaaacaaagcaggtggaactcttcttgtatgcacagcatctgatttggttggtctggcatgggtctgggagtgagcacacctaccaagcggctgctggggtaacttgcgttttccactgatgatttcagcaatgtttccggtcccacatgctcctccagaaccttgtactcccccatgaaaaggtggagtccatttccccttcctttatttatttttttgagacgaagtttcactcttgttgcccaggctggagcgcaatggcgtgatctcagctcaccgcaacctccgcctcctgggttcaagcaatgcttctacctcagcctcccgagtagctgggattacaggtatgtgccaccacgcccagctaattttgtatttttagtagagacggggtttctccatgtcggccaggctggtctcaaactcccgacctcaggtgatccgcccgcctcagcctcccaaagtgctgggattacaggcgggagccaccgcgcccggctatttccccttcctttgaacctgatcaggacttgacgatggcatcaacatggtgagagtgaccctgcatggcttatgaggctgggttacacaaggcgatgttgcttctgactggctccctctcaggatacatgcccttggaacccatcctctaagctccttgggagcccaacttagcccatgtggagacaagacagggagagaaacagaggcacccccagccctcagccagcatcaaccgccagacaggagagcaaatgcgccaacaatgattccagctgaagcctcagacagcgtggagcagagatgagggatccctgcagattgcagatgcgtgagcaaaatgcatgctgtcactgttttgaaacaacaatgtctgggggctgtttgttatgcagcaatagacagctgtaacaatgctgttactgctgtattccatgaatgactgcactttgagtagcagggggctagatcactagataagccccatggcttctgtgtatgctatttttctacttttatatccttttcattcactttttttttttttttttttgagacagagtctcactctgttgcccaggtgggagtgcagtggtgcaatcttggcggactgcaacctccacttcccgggttcaagcaattattgtgcctcagcctcctgagtagctgcgactatagatgcacccccatgcctggctagtttccgtatttttagtagagacggggttttgccatgttggccaggctgatctcagactcctgacctcaggtgatccacccaccttggcctcccaaagtgctgggattacaggcgtgaaccactgcacccagcctcattcactttctttacttggctcatttttccttgttgcctcaattctcctctaagatcactttcctgacatttcagcctgggcctgttgccttctctgggtcccctccgcctcctgtgcctcccccatctcagccttgatccctcagattatacttcctctgtccccaccctgaccatcttggctgtccctggatagggatgggtatcttctcccactggtctgggagatctggaaggacaggcctggaaaagacttggtcactgctggaaggagctcagttagtgtggtgctgaggacagtacgggtgaggctggccccttcacccaaactcccactctcttccatagatttcacctctgtggcccaggccataggattagggcaactccccttaaacatcgagtccatcctccaagctgtccttttttttttttttttttttttttttgagacagagtctcgctctgttgcccaggctggagtgcagtggcgcgatctcggctcactgcaagctccacctccagggttcactccattctcctgcctcagcctcccgagtagctgggactacaggagcctgccaccacacccggctaattttttgtatttttagttgagacggggtttcaccgtgttagtcaggatggtctcgatctcctgacctcgtgatccgcccgcctcggcctcccaaagtgctgggattacaggcgtgagccatcgcgcccggcctcatgctgttcttgaatagtgagcacctgttacaagtcgccccaccagcctctcacttgtacccccctcatctctttctccccaagagacagaggaccctggcacttgtgaagcatgacccagaccctggggccatggcatccaacatcctcattccccatgacccctactgtctagatgtagctgccaagagacccccagactccccgggcctctgtctagagtgccaagacagagagagaatgccctgccgcttgcatgctttgtggggtgtccttcccccttccctggctgctaggcgtgacttcaacgttctccccaacccccaaacagcagcactgacaccagctgcagacctggctcaggttagctaatgaggaccaggctggggatggagcctgaacccctaaaccccagtcctgtaccccaccctaatcctggggtctccactggacaaaacgaagcagcttggtttttcgttgttattgtttttgagatagagtatctctctgtctcccaggttggagtgcagtggcgtgatctcagctcactgcagcctccgcctcccgggttcaagtgattcttgtgccgcagcctccccagtagctgggattacaggcgcgtgccaccacacccagctaatttttgtatttttagtagagacagggtttcaccatgttggccaggctggtctgaaactcctgacctcaagtgatttcccagcctcggcctcccaaagtggaagcggcttatttttaaggagaaaactcccgtggaaaggaatcagcacctcctctgtcaacatttcacttctctgaaaagactctcacttccaacagaaagtgctttgtaacacaacaatgaggctgggcgaggtggctcatgcctgtaatcccagcactttgggaagctgaggcgagtggatcacgaggtcagaagttcgagaccagcctgaccaatatggtgaaaccccgtctctactaaaaatacaaaaattagttccgtgtggtggcgtgagcctgtaatcccagctactcaggaggctgaggcaggagaatggcttgaacccaggagatggaggttgcaatgagccgagatcacgccactgcactccagcctgggcaacagagtgagactccgtctcaaaaaaaaaaaaaaaagaatgagaacatatggacacagggaggggaacaatacacacaaacaaaatttagaaacaggtgaaaataattttagtaatatttttactaatactgatatgctcaaaatattattatttcaataagtaatctaaaaattattgagatgtcttatgttcttttcatcatactaagcctttaatatttggtgtgtattttacactcacagcacatctcaatttgcagtccccatgtttcaagcactaaataaccatgtgtgtccggtggctaccatactggacagcgttgatctgaaatcgcatctgtatgcatcaccagcatatttgcagagatccccatctcagcagcacacctgaggctcatctgcgaaagcacctgcaacttctctacaacctcccacatcacctccaaacacatcctcatgtcatctgcaaacacacccatagctcacaggccaatgcctaaatatcattgcaggcaccttcagagaaagcacttactaaaggggtatacttgattccacatctgctttgacctgcaaatctcccttctcctttacatacatttgcatctcatttgtatgtcaatctaaatccactggcagagcctcagatcatcatctcaaagtcaggtggatgtggggctgggcaggcctccaggtgttcctcctcctgcttcctctggggctcttgatcctcctcctcttccttgctgctctcctcctcctcctccaatatggtgaccagttcctcccgcagcgcccccatctccagccccaggctgcacagctgtcccagcagctggacatccactcggcgcaggttcccctgccagtaggaaggggacgtcacagggatgccaccccagagagcaaggggtctctccaggacctgggtgagagcaggtcccaactcatgtcctggccacagcgcctgggcagggtcctcactgtgcccatggaccctaactgccttcctgcttctcagagtgtctcttgatctctaactcttctctttgtctctccatttcattgtccctgacttctctctctctgtctcctccctctcttatctatatctgtccctgtttccctttgtctctgtccccatttattttttgtctttccatgcccctgtctctctgtctttatgtgttgccatttctctgcccctgcctttggctctctttctctcgcttgccctctctctgccctccccaactttctcaaattcagtctgtctctccatctctgttcctgctctccgtctctgcttcccacctctgtccctctcttttgggatctccctgtccccacctctgttcccgtccctcactctatgtctgtctctcggtgtctgtacatgcctctcatgtctctgcttctatctctcagattctgtttttcgatctctggccttctctatttttgttcatttccattcattctcatttcctctctttctctttcccttccaaacccctcactcaccagctcctccctgatccacagcagactatcgcaggcacctccagtgtctgcccctgcagtcctgagggtctgaccagggatttccactggggagacctccctcagggcctgggggggtgggcccagccccggaggcaccagtccagcctgattcagctgcctccacagttccatcgtctctgagctatggctgcaaggagcaggaagtagcaaggtccagggtggcctggtcccctggggagctgtgtgcgtggtggagagtaaagggcagagggagtgggatgggggttcctgggaaaggtatcccaaagtccactcttcagagagaatcagctggccttgtgcttttctttttccttctgaagtctaacctcaactctgctcacagggttcaaacatagcctcttgcagaggtctaactccacccttccctgcctgtctcaggcctgacccctcaggggcgctcagtgtctgtagatgcctggcaccctctgtccttccacctgccccccaccaccacttctccagcctctcctcagcctccatttgacctctggcttgcccatagcttggtccttgcttgtcctcttggcacgggtcatcctagggctttcccaccagtgtgcctttgggggcaggaatggctcccaggggcaccaagacagcaatcccttagctggagtgcctgtgtccaggctgctggcctagggccaagcagccaattctgctgaccctggacttgcctatgggtatattatccctgttgagggtgagggcttctgctgtggaaaagtctgggaagcactgcaggcctctctcggccttggacccttccttcagacccaaggtgcatatatatacatatatataatggtagatcacgaggtcaggagatcaagaccatcctggccacatggtgaaaccccgtctctagtaaaacacaaaaaattagccgggcatgctgccgcgtgcctgtagtcccagctactcgggaggctgaggcaggagaatggtgtgaacccaggaggtggaggttgcagtaagccaagatcacgccactgcattccagcctggcgacagagcaagactccatcttaaaataaacaaatgaacaatatatatatatatgtattttgttttttgagacagagtctcgctctgtcatccaggctggactgcagtggtgcaatcttggctcactgcaacctccgcctcccgggttcaagcgattcccctgcctcagcctcctgaacagctggggttacaggtgcacgccaccacacctggcgaatttttgtatgtttagtggagacggggtttcaccatgttagccaggctggtctcaaacccctgacctcaggtgatctgcccacctcggcctcccaaagtgctgggattacaggcgtgagccaacgcgcccagccccaagtcccttttaccatagaaagtaacatagtcacagtgcccagggattcacaggtatggggagagggttcgttattcagctgccacacccaccttcctaaacctgctgcccttccagtttcctcacgtgcacagccacgcccgtctgcttttagtttctcaatctgttggcttaaccttcaaaacaggcccaggatttgagcacttctcaccattccctctgccccatccccattcatctcttgcctagactgctacagcagcctcttttactggtcccctgcatccacccttgccctctaaggcaagggtccccagtccctgggccaaggaccagtaccagcccctcgcctgctaggaactgggccgcacagcaagagatgagcagcgggtaagtgagcattaccgcctgagctccgcctcctgtcacatcagcagtggcattagattctcataggaggcaaaccctattgtgaactgtgcgtgcgggggatctaggttgcctgctccttatgagaatctaatgcctgatgatctcaggtggaacagtttcatcccaaaaccatccccaccccacccccgacccccagtctatggaaaaattgtcctccacgaaaccagtccctggtaacaaaacggttagggaccgctgctctaaggtacattctccacctggcagaaataatctttacaaaatgtaaatccgattttgacactcccttcttcccactgtgaatagaataaaaccctaccaggcctgcaccgtcagcccctgcccacctctcaacccagtctcctatctctgtctgcaagctggttcccacctcaaggcctctctgctctagaggctacctctccctgcagcgcttttcccctagatctttgaatggctctttccttatcattcacttctacttcaatgtcacctcttcagagaggcctttgctgatggccctacacccagtcacttttttttatctgcttctcatcaaaattgccttgctgattcctttgtttcttattcatcctctcccacatccatcctctcccagcccagaatgttgacttcctgagagagggactgggtctgtcctgctcaccatggtaacctcggcatctagaacagtgcctgccatcacgtggtaggtgctcagtaaatattcttggaactaatgaatgaataattctatccacaagacttcacaatggctcttcatgctgcgatctagctttcaactccaaactggtcttgagatctcacctcagtctctaaccttgacatctaacctcttcacccactctcttacctgaccctaatttttaaaaatgacgtggtcagcttttcagccccctcattccctgtttttaggaggtagtgagtggaagctggaagaataagaaagcttggggagactgcaattgcagtcaggaaagaaaggtactctgccgggaagaacaccccatcttctcctagggaaagattgtggagtcctggggtttgttttgtttttcaattttttgttttaagagacagcgtctcgctctgtcacccaggctggagtgcagtggcgcaatcacagctcactgcaacttcgacctccccggctcaagtgatccccccgcctcagcctcgtgagtagctgggaccacaggcgtgcaccaccacgcccggctaacattttattttttgtggatataaggttgccctatttctttgtggagataaaggctcccctatgttgcccaggctggtctcgaactcctggcttcaagcgatgctttcgcctcggcctccacaaagtgctgggttcacaggtgcgtgagcccgacctgtgtctcgttttgaagctcagggagagggcgctgtgagcaatccctaaaccctttaagagtaaaaagtgcgtgcacctttaagaggacggttagaaaacgcggggcgtggccacaggagaataagttcgcgctgaaccaggagcgtgggataagaccggccccttccggttacgaaaccttagcaagatggcggctccctgggcgtccctgcgcctggtcgcccccatgtggaatgggcgtatcaggggcatccatcgcctgggtgcggcagtggccccagagggcaatcagaagaagaaaaggacaatactccagttcctgaccaactatttctacgatgtggaggctctgagggattacttgctccaaagggagatgtacaaggtgcatgagaaaaatcgatcttacacctggctggagaagcaacatggtccatacggcgcaggtgcctttttcatcctgaagcagggaggcgcagtcaagtttcgagacaaggagtggatcaggccagataagtatggccatttctctcaggagttctggaatttctgtgaagtgcctgtcgaagctgtggatgccggtgactgtgacatcaactacgagggcctggataacctcctccgcctgaaggagctccagtccttgtcgctgcagcgctgctgccacgtggacgactggtgtctcagccgcctctacccactggccgactcgttgcaggagctctcgctggccggttgcccccgcatctccgaacggggcctcgcctgcctccaccacctccagaacctccgcaggctggacatctcggacctccctgccgtgtccaaccctggcctcactcagatattggtggaggagatgctgcccaattgcgaggttgtgggagtcgactgggctgagggcctgaagtcagggccggaggagcagcctcgggacacagccagccctgtccctgcctagcctttagccctgtccccactcacgtggcttctcagcgggctgcatggaatgtctggtagctcaccacacttctggcttccatttgtcttcactcaacgtcagggtgggggagtggtgctggccaatcacaggagagagcgtgagttcccagtatttattcctggctgcccttggctaaaggtcacagctcctgtcaccctgtcaggcagccctttccatgcccctgttcaggcctggggaggtaaaggctcaggctgttagtagccgcagagagccacactcaccttgtcaggagactcttctcaaactgtccttatgtgagtgcactgccatttcttgcagggaccctgactgacacaggggctactactgacactttacagggatggttctcccccgtgcagggccgctgtgcccactgcaggacatgcagcatccttcgccccactccactcactaaatccataaccagcaatactatggggcctgctagttctagatcgcgagcggccgct

SEQ ID NO: 735304 - DNA, 187827 bp, Homo sapiens
ctccaaggctgagggatgaggagacctgctgaggacccagggccttatctttccatcccactccataggtcccagtattgactgatgctgtcttcacctcctagcctcacttttaaccttctggcacccgcccaccactgtccagttcactattgaagccctgccgtccagtgctgcagagggaaaggatgttcttctactggcctgcaatatttcagaaactattcaagcctattattggcacaaggggaaaacggcagaagggagccctctcattgctggttatataacagacattcaagcaaatatcccaggggccgcatacagtggtcgagagacagtataccccaatggatccctgctgttccaaaacatcaccctggaggacgcaggatcctacaccctacgaaccataaatgccagttacgactctgaccaagcaactggccagctccacgtacaccgtgagtgattcccccatacctctgggtgctggcggtcagttctgcttcacacacatgagattgtcaggcctgggctgtgcctgcatccccctctgcattttgtcccgtgttgagatttgggcatttagtgcaggacacacacatggtaggtaaacttcaacagatcagaattcctttcctgcatccaggccctgcagacactgatggcgggggcgggggggcctcagcagggggaggtcagtctcagccaagcaccccatgccctccccatgaacctgaccctgagaaagaccctggagaactgggtcagggcctggcctgagggcgtcctgggaacctcacaaaagcccagcctcaggactcctgactccgtgtgaccccgggaagcctgtgtcagggctggggtgtggtctcctgggcagggcttactgggagcaaggatttaccagatgtctgcgggctgtggttcctgaagcttctcatcagtgagggctcagctcccagagtctcatctagacaaggacagagcctaccactttccctgggactcagcctggagagggcagggggacaggattactagggcattggccccctgaatgaggagcttaagagatgcccttgggcagtcagtggcccaggggtaggaacagaggggagaaaatgttcctggcagcttcttgtccaccggggatcatgcccaggggtgctctcccatggaggcaaataacagatgctgttgatgtgaacacctcctctgtgccaagcttcatgtcagatcctgtgaataatttaaagttcattcacagacaaagtggcaagcctcagaccattttccatttacatattgtatggaggggaaactgaggcacagagagatacagacaccggccacggtgggcagatcgcagctggcagagtcacatgagggctgtctgcagctgctgccacgtcctctccttcatccctggtgccttactaggtgtctgtggaccttagaacagccactggttcggatgttttcttcttaggtgtctacagctcggagggggagattctggtctggagagttatgagtaaatacagaattaatcagttttttcttaactaaatcacctgcctcaacaatcagtcagtgctggggaagttcaggcctcctcgctcaggtccacaccccgcatctctggacatgaaatggcttcgtgtgttttctgatgtgtgggtatcattccaacaggaggataaaggggaggactttgctttctctccccattcacaccctgcaccagccagggcccagtgtgagacacatactccgtagttctctcatgaaggagggagggaatgaatgaaggaatgatctataacctcttcagagacagagacctggatacaagatcctaggaggttctgggcccaacgtgagacacacactctgtagttctcttatgaaggagggagggattgaatgtaggaatgatctataacctcttcagagacagagatgtggatacaagatcctaggaggttctggccacacctgttttctgtccctctagagcctaagacccatgtctcattcatctggcccgtttctcctaaatctgcccctgggagctgagtctcatctgaccctggggctgcagggctgtgggaaggttttcaggggagggatcaggcttgcgggtagtcccacacgtttgccttacaccctggagctctacctggttctcactatgaatatcccataataatcccccctatcctttctggggagtagaaaaaaagtaaatatttaaaaatatgccagagcatctgttcttcttagcaagttcagatagttattagttagcaggaataaatcgttattttaccagagcctcacctgctgggggtttatgggagcctaactgactgaggggggtgggaaatatccaactccagccccctctagccatcatgtcccacctaaaggagagaaaaaactgagaggcacttgtgacattcacagcccagggcacagactctatccaggaccacagaacccctccctccccccactcaccaccgcatcactgaacgcctgctcacccaagttcctgttgcccagtacatcatgtcctggctttcaacaaaaactacaagacagactagaggcaaaaaaaaaaaaaaaaaaaatgcagttcgaaagacagaacaagcatcagaaccagatgcagatgtggcagggatgtggcagggatgttgaaattatcagaccaggaatttaaaacaactctggggccaggagcggtggctcatgcctgtaatcccagcatttgggaggccgaggcaggcagatcacctgaggtcaggagttcgataccagcctggccaacatggcaaaaccccgtctctactaaaaatacaaaaaattaggcaggcatggtggtgggtgcctgtaatcctagatactcggaaggctgaggcaggagaattgcttgaacctgtgaagcggaggttgcggtgagcctagattgtgccactgcactccagcctgggcaacagagcgagattccatctctaaaacaaacaaacaaaaaacaatactggctaatatgctaaaggctgcaatggaaagcatagacaatgtgcagaacagacggatgctgtgagcagagagatggacaggctaagaaagaataacaacagctactatatctatctatctatctatctatctatctatctatctatctatctatctatatatatgtatatatatgctagagatcaaactcactgtaacacctggatctcagagtggttgtgaggatgtttattaggagattaaagagattaaagcagagttatacacagggcgagagctcaactgatgctatcaactagtattcttatttttttgatgttgttattggcaataaaatcaggaacaatgcagtaaaaatttggttttatcatgtacgagttctgtgaccttccttgacttactgaggtactgtaagtctcagattctaactctgcagatggcggtgatgcccctctccctcaaggtgatgtgaggatgagatgagctgtaggtaggttggtgcccactgtgcctggcacatggaaggcccctgaaaatagtcaatgaacatcatccccgctcatcagcatggagttgacagtgagggctcgctctctgtgacaatcatggaatggaaaagaagaaacaagaggaagactgggcgcagtggctcatgcctgtaatcccagcactttgggaggccgaggcgggcagatcatctgaggtcaggagttcaagaccagcctggacaacatggcgaaatttcatctctactaaaaatataaaaattagcctggcatggtggcacaaacctgtaatcccagctacttgggaggctgaggcaagagaatcgcttgaacttgggagatggaggttgcagtgagccgagattgcgtcagtgcactccagtctgggtgacagagcaagactccatccaaaaaaaaaagaaaaagaaaaaagcaacagagggaagaggtgtgacatgagaggaagaagggatttaaaggtacaggagcagggcgaggtgcaagcacctgtgggagaatgtaggagttggtacatcccagtgtgtcaagtctgagacacagaaaatggtgcaaccgtggagagcaagggagtcagctatgaggacagcccaacagaccacactcaggctctggagcatttccttcctccctgactatgcccctgccctgcaatgccccttatggtttcccttggaacaaacttgggccttgtcccctttgccttcccctttctgcagaaaacaacgtcccaggccttcctgtgggggccgtcgctggcatcgtgactggggtcctggttggggtggctctggtggccgccctggtgtgttttctgcttctctccaggactggaaggtaccgcagcttttccccagcctcctcccacccctaggctgaccccagtcagggaggagggagaccccgccctgtattcagggccaggctttccgcatcctcccaaggaatccttccctctcattccatggctcctcccttgccagctgctgatcctaggctgcctcttcctttatgaatgtggcacagttaaggttgcacccctgagtgctgtcctagttccctaacacagcaaagccacagctgcctggagggaggaagggagggagggagggagggagataagacgggagtgctcagaacctggtaccttctgctgttcattgaatttacccacccagtgaggagggatttgcaggcttgagatccatggtgggggtcctgggcatggtcacgcagtggggagtggcaaagcctggacaggctgggtagggtcagcaccccatcgtgattgatgtccctgaggtgtgagatgggagaacctggacctcaggacctgctgtcctttatgtctcttgccaaggggtggagagagagaggacaaggccattgccccatttcagcatctccaggcctgaaaggagggtctggccatggcagggatactgagttctgggagaatatgatacatgctccttgcctccccatgcccccagctcccccagtgtcctgcacacacagccggccctgctttccctctggggccttgacccttcctctcaggcaaacgcaggtggtctgattccctccctgagtcctcagtccctttcctgggtccctgggtcaatgttctcctcacccggcatctgcctgggggggtccttcctctctggccaggacagacgtgactgcttaaggcctatcctcagctccccgtcctcggccgctcctaccacgaaactgatggagacaggaggccttcactccagtccttgaaaatggagtcccttccttgtcctttattctgcccctaaacctgtgatttctccctgcaccctcatgaataatcctgacctttcctagggccagcatccagcgtgacctcagggagcagccgcccccagcctccacccctggtgagtgtcccttcagcccaggtgtgggagcccctaggcctgccctacggtgtccactcctgccagtcaccccctgggggcctctgaccctttctttggggctgcaaggaggatgtcaggaaacatgacacaggggaccccgactgtcttgttcagactgatctgtgggctctgggtcgtgggtcacctcctcgacctcagctgctcaggtctcccctgggaagaggctccctctccctgattctctgggagctgaggacccctacactctcctgcaggaggggcccaggctctcctcccaccctgctgctcactcctgtctctgtccccaggccatggtccctctcacagatccaccttctcggtaagcctgttccctccccagcccttttctactggggtcccaacagtgcaggctcagggcagggggaccatcaaccccacagcacagcactgacccacctttccccagaacagtcaggtcaaagtgagtgcctccagccaggatccgggcctctctacagggccaggaccacccacgccatgtgctgacccctccccgggaccctctacacctgaggagaaccctggagtccagcaggtgcagaatggacactgggaccatcagtcagaggcccacattaacaagggtgcggggtgggcccagccaggacaggggtcagggtgttgtgtccacactgggaggctgagctcaggggcagagctggtcaatcctgaggggaaatgagtggaagtggaggcagggaagtaagtcctggccgatcagagacaggaaccttccaggctgggcttccgtgaccctccctccctgtcccctgacatctcctctctcccctgcccaggcccctctacccagccccagaacagccactcccatctatgaggtgagtgtgggccatggatgttctggtcccgcaggctccaggggacccaggatctgcccccaccagcacctggctgagctcagattcaggaaaatgcagtgaaaatgagaacaggtggtggtgagcagaggagggaggggcctgggaacagggaccccctgagcacagccaggttcagccccagagaagccctgggtgggcccagagcctgggagatgccagacactgttctgagaaggctacaggggttgaggcctcttctctgtttttacaggaattgctatactctgatgcaaacatttactgccagatcgaccacaaagcagatgtggtctcttaggttcctctgggagctgctcttgtgggttgatggagcgtccccaaagctcccagccctggggacggggaaggacatggagcctgagccagagaaccagctctgagtcctgaggagacacaggcctggggacagggagggatgggagtccctgctgaatatctggagaccctgacaggttgccctgggctctgggtgggccgggacaaaggcctctcatcaccacaggaagcgggggcttgcaaggaaagtgaatgggcctgtggcccacccggggtcaccaggaaaggatctgaataaagaggacccttcctctcattggctctttttctgctcacgggaacttagcagaaactcacctgaaactccgtgtccattctctcccgggtcacacagggaaaatatctccaccttgtctcaaccacagtctctcttccctgggaggcagaaataggggttgggagtcaggctggggtgggccctacacaggaaagggcaagattcacatgagccctgcccagccagccgagcgctcagctgtcctcacactaccccagggaccaaggccatgcacagccccagcctgggtccctctgtgaatgcatgtggggtctcaggagcacagaagatggggccatctgatgtccacaaaaggtgagcaatgcgggagcaaccatgggtggtataggttgcggctgtggcccctacgcagcctccagtgtcctgacccctgctgccctcttcacccaggccctggaggcccagtctatcactgtcctccacaaatgaacttacctgtccccaaatccaggatcctgtgtgcttatacctggccactaggttctcctctgtcccagtggctactgctcaggacatctttatccctggtggggcacagagaggggctgtcagagcaaccaagattaatacagacgcataattcagtccttgagcactacccaggactctggcccctcattgctcatcagttcccactttaccccctggcatggatctcactgagcaagccaactctttacacaggagcatccaggtcagaggtgcaggactcccccatctaaagctcatgcaggctcccatggcgatgggacaacctgtctgctcctctccctggcccacagccctatctcgcctgcagctcctccacacacctgggacagcagttctcagcccttccctgagggcccctggaagggtgatgatctcatataggttcacttgaaccaggtgccaccttcccacaagtgagctggtgcctgcactaaagcacagagccacagttcccaagagtgttctgccactgccacaggtcccaagagtgttctgccactgccacaggttgttcgtcctgagatgagaggtaagaaaacaacccgcaatgggttgttttatatcgggatttgcatcaggatttagctctaaatgacccctgatcccacctgcacacagcgtcagatgagacaaggtgaggcctctttagttttctgttgaggctgtgacaaattaccacaagcttagtgacatagaaacctgaaccaaagtgcccacatggctgtgttctttctagaggctccagggaagagtgcatttcctctccttttccacctcctagaggcctcctgcaaccttggctgtgtcctctttctccatcttcaaagccagcagcacagcatcttgaaactattctgtgccctgcttccatccccacatctccacctcctcccacctccctctctcacttaaaaggaaggagccttgtggttattttggacgcacctgggataaaccacaacaacctccccatctcatgatccttcctttaatctgtaaagtgtcctttaccacgtgacatgtccacagatctggggatgaggatgtacacatctttgagaggcccttgttctgtccatcactcctctcaaggccatcttctcatcatcgttcactacaaactacacatgggcacctggatgggttcatcatgactgtggcgtcagttcctgcattaacatccccagcaccctccagatcctgagagagggagacggagggctctccatgcccctagtacctctccaccttcttcttggtgacatgcttagttgctaagaataacagaaagcggaggtgactgaaagatcacaactcaccggcccttcaatagttcgtggacatcagcaccacggacagtgactcagtgaggctaatttccaggtggcagcagggagcatgcagataggagggaactgcaggaaaagctgcccattctattctatatgagaaagagtgtaagaaagaggaagctattacagggataatgctattcttctctaatccataaattgcgaaacctttgcatgtctggatatcatggtttttagcacatctgctgccactccctgcagggctgattgctgcatccaggatgtggtctcttggggggctcacagcctgctttggcctcatggtgagtctccctgcccctgacactcaggccactgtctctgcctacaacatggtgggaaccttccatgattaacgtctgattctctgtgcctgacctttgaagcacatccatcactcagcctggagcatccgctgagctcagcatcctgctcctccatccccagctgagcccttgaggagatgcttgagaggatctcctgggctcctctgtgagctcctccaggctgagccttgtgcttggtgtcagaggcctttgccatctgcttgttctttccataggcaaataatcctcctcagggacaagtggggcctgaagatctgtctgaatatctatctatctatctatctatctatctatctatctatctatctatcatctatctatatgtatgtatatatgagaatgctttattaggcaaaactgcatactatgaacatgctttaaaatgcaacaggatgagatgtgaagacataaagaacaagtgtgtagtgacacatggctatcagaacacactgaagaatccacaccgcggccgagagcagtggctcacgcctgtagtcccagcacttttggaggctgaggcaggcagatcacttgaggacaggtgttcgagaccagcctgaccaacatggtgaaaccccatctctactaaaaatacaaaaaatttagccgggcctggtggctcatgcctgtagtcctggctgttcgggaggctgaggcaggagaattgcctgaacctgggagacacaagttgcagtgagctgagatcgcaccactgcactccagcctgggagatagagtgaggctccatctaaaaacaaaacaaaacaaaaagaatccacactgcttccccgcttcactttacccagaaaaggaatgttctaggccacttcctcttcagcacacatccccagggaactaaaataggttcacagtcacccccatcttcctcattcccatcacctcttacccacagaggcatctctggtcctacagatccagccctgccttcaagaggcacaggtccaacccatccagtgtccctgctagtcacacacagcactcagggtacaatggagggcttctgtgctttggatgggaacaaaccccacctcacattcccacacctgagaagccaccagggtcctctctgtcctgtcctcacactcaatgtctgtcctgggtcacccttgtcatctctcctggaaataggcatggctcctgacaggtaggattgaggctttgtcttttcaggagtccctcccactctgagcacatgaaactgctcagctccatgcaaccctctctcaccaggggccttgttctctgggtccctgaatacctgggtccatgccatgtacattttaagaaaaatgacagtgactctcaccctgacatcctcacccaaggcacgtgtctgacaagaatcaccaggtgagatacctgtggctccacacacctgaggcttcactgcgcaggggtgtcctcatccctctcctcccacccctagggacagtaagcaccacaggctgccttggaccaccagctccccctcccagacacagcctcagatctatactgacatgctacatggagaggctctgatgaacagcaggtattaggaaatcccaccgaaccaggtgccacttgcggccccactcctcctcatatctgtgactgggacagacacacataacacacctctgttcaccgcccagcccccaaggtcaatcacagtctgcttctcccctagatccactgctccccatgtcttccgtcctcagctgcatcctgggtggcctccttgctgttcttgtaccccagaggcaggttccaacctttgtgatgttgcctgcaatgcccaaactttcccttccccttccccttcccttttcccctcccccttcccctccccttcccctccccacccctatcccttcgtcttcccttgtcttcccttcccttccctataaagccaaacatacccatccacctaccttgtggtcaaagtcatcagcctcctgctccactcagtgttctctgaccctgcatatggaggtggtggcccctcctagaacacccaccactcactgtcagccttgcgtggtaatcacagattttgcaggggttacctgtgttcaggtgtgtcacctgtggaaccagaactcttggaaggactggcagagggagctgcttaggatatctcagggctcctggcatctggtctaccacagggctattaacaacagcacttagggacaaggtggaggatggacggttaagagggtaaatatggatgatgtgtgggcaaagaataggacacaggaacacatgcagtactcaaataattatgccaagaaaggtgaggacatggagatggacattcccatatacttctgatgggactgcagtttagtccctacagcaacattgacctcatcatgtttaacgcgcacacgctctgaccactatcctacttctgaaggcctccctgtgctgtgagctctgagaaggccaagcttgcctgttctgtctctgctaaagccagagaccagccaatagcccagcacagggtacttcataaatacatgttgaaggaatgagctccaggaacagtactccacatggtagagatgtgtgtatgaggatgttcactgcagaaggtcatgtcaatgtgacaagtgacgagcagcctcaaatccagcaacaggggtgtgggtaaaagatcatagtgtagccatgcaatggaaccaatgaaaaaaccacaattagagcaaatccacatgtattaataaaggaggtgccctccatacatgctgcacctaacagaatgttgccaaataagaatgaaaaatgatgatatttgggctgtaaaaactagaagtcagctaaataagaatgcatcgaaagtatttgtgaatgcttacaattttataatgccttggcatccgttttggatggaagttggactttctcataccagaagcagggctcagtcacctttgaaatagtttccagttctccacctccttccagttcctcagtgtgattgatcagatatctgatttatacaactgcctcctggtgacctcctccctatgggacttccggatacagcccgtatgactgccccactgaccccacaccctgcctgctgcagtgaccacctctaattacctggatctcatgtctgcttgcattaaatccaccaattaaaactccctgaggacaatctgtttgaataatattctgtaccctaataaaggccttgacccatgggttccccctctgtcctccccatactgcccctgacctctgtgtgtgtgtgtgggtgtgggtgtatgtgtgtgtgtgtgtgtgtgtcctccagacagggcctgtatcccccaggacctgtaagtaataaatctttattttcatcttatgtctctcgcaatcattggcaagagctctgcatcttaaagatcgcaaatttaagaaattggtgtagtcggcacaatagagtacctcttctgtttagcacaagatatctcggagctgctgaggcttttaacatcctcgccggtgtggctgcctcactggtgaggccgttctgttcagtgcaattcagttgctccactgtgtgctgctgtgttgctgctgtagagtgctgccatgttgttctccccaaattgttaccgagtaggaacctgtaatgtgctcccaaggtggtctaccccatgagaagggggattctccatctagggcaagggctaggtgtgtttctggaatcctaatagggaaggcatccacagagggtgaactccactcctccttagagtgaggagtgacatttcccatttattttccccatggaggtgccatgtattgactttttctttcactgtcccaaggttgagccaaggtgagctatggagaccagggcaagataccatttctgttagcaaagcaaatgggtgacaacgtgtggagaagctgtggttctcctgatggatatagcagagtgccatttagtaaaatcttgtcaggaggctgcccctggttagaccggcagtgtctgtagtcactaaggtggatgcgaattttaggccctgggccatggataatccctgcagacacagccgtggcttcatgtgatggggcaatcccgggctagtggctcccttgtttctgcatttcttgctgtggttgcacaatcaacacctcaggggttgattgggtcaccttggaaagagaaacagctgcctaggaggctggtgcacatggaggccaccctcaattttattctgctaacaagttgtaagattaaaacaacagggggctttgggtaccatcaggaacttgtcaagtaaacatccaaagacagaaagaagaaaaagaaaaagacattaaccgtctagaaatacaagccattttaaagattttgcttaaaagatgcgcttgggctgggagcggtggctcacacctgtaatcccagcactttgggaggccaaggtgggtggatcgactgaggtcaggagttcaagaccagcctgaccaacatggtgaaacctcgcctctactaaaaatacaaaaaattagcagggcatggtggcaggtgcctgtaatcccagctacttgggtggagaatcgcttgaacccgggaggcagagacggcagtgagccaagatcgcaccactgtactccagtctgggcgacagagtgagacttcatctcaaaaaaaaaaaaaaaaaaaaaaaaaagacgggcttgtttcgtcgttgtggagtcatcccagagagaggctactccctagagtcactgaccacctttcctcctccatcttttcctcttatcattctagagacagaaaacaagaatctcagctttaggtggctaacctcaccccccaagaaaagaaactaccactttgattgactacaaatccaagaaaaataaaagagaaactttaaaaagtactgagcaaaccacaggtctagcaaacataatgctagccctaggttacttattcatttacaacaaacccctagatataggaggaaaaaataaaaggtaattaaatatatacacatacaatattttaatataaatatataataaatagttaaattatgtatgtataatatgtaactaaatcaaagtaaaatttcatactttgattctattggaaattcaaaattcatttattaacttatatattaaggaatttatgtaaaaaaagatttttaaaagggcaccaatttgcttttgtgtctctacaacataggatctaatttaactttacatttgctaaatacactaattgacaaatattcatggatttaatcaatactggggctcaaattgtagccacacgtgggaatcccataaatttaaacactctgtccctattatcttgagaagaaaactaaatataaaattgaaaaaaacaggtatgtctcaatttacctgtaactttgcctaaatttcccggagtcatatacccattgctgtaaaacattctctattggacataggtgctctgagacaataaataaaatagaagtgtttttggtacttagacattggcttgacaaaatgggatcccatgaaacctcagttaagatagtgaatacggcccaatgtgagttgaaatggggcctttaaggattaaaacttattacatgaaacctagtaagtaatggggtgattatccatactgcttctccatttcatagcccaattttgacagttgtcaaatctggaaaaaacaaacaaacaaacaaaaaaacccctgggaatctgttgcctcacagagacacaaagtagacatcaaaattgtatatctcagttccagttccaaaatggtggcatagaagcaagctggctttactccttcacacagaaaaccaaaaacaaatatacagcaccaaaattattaccagatatattccagaactcaaatatgaaaatgaaacagttttcagagccacagagaagtgaaaaaaactcccgacagatgacaaaagaatcagatttccccatctgtaatgtccctccctgccccattctgcctggtaccaggtgtgtggaaaattttaccccaactcatggtttctacactgggaaatgtaagatcaatgcgggcaaccagtttctgcacaatcctgggttccctgtccctgccttaacccacaagaagcattgtgagtgcccgaagggagaaatttccctgaggacagtcaaagagtggggaggcaggactaccatctccttccctggaaactctgctgtgtaactcagccaagggagacatgaaatcagactggtgtttcagcagctccatgttgtagtaggtttgtttcacaggtatcctgggcatggacatctagccagctttcccacactgccaggatatcccctttgggacctccctcagttaggaagggcacactctgatcatttactagggccaaggtaaaccctaaaggtaacttagagatgaaaaggaggtagtgacctagcagtaaagaactctaagaaaatctatccaataaaaatcaaaacaagccagacaaagactaaaataaataatgaatccttcaatgtaaagacctggacttacatccacaagaaacagtaagcaggtaaccatgatctccccacatggacaaagtgaggaacaagtgactgatcctgatgagatggtgatgtgtgagctctctaatcaagaattcaaaactgcagttttaaggaaactcaatgatcttcaagaaaacatggaaaagcagttcagaaatttatcagagaaatttaacgaagggattgaaataatttaaagaaaacaaacaggaatcttggaattgagaaatatatttgctgaacaggaaaatttattagagtctctcaacagcagaatggatcagaggaaagaatcaacccaaataagactcccccaaggcataaaataatcgaattctcaaaagtcaagggcaaagagaagattttaaaacagaaagagaaaagaagcaaatggcataaagaagctccaattctgtggcaacagattttcagtggaaatcatacagaccaggagggagtgacatgacattctcaaaatgctgaaaaaatattgacatttgagaatactttatccagtgaagttatccttcaatataaaggagagagaaagtttcctagacaaacaaaagctgagataattcacaccatcagactagtcttcctgtaaatactaaagggtaaatactaaatacttcaatgtgaaagtaaaaaaaaaaacactaacatgcaaaacaaccacaacaacaataacaacatttgaaggtataaaatccactggtgaaattaagtacgtagacaaacccagaatactcaaatagtaattgtggaaagtaatccaatcataactctagcatgagtctcaaaatataaatctatcaaaaacaataatacattttaggaggccaaggttggcagattccttgaggtcaagagttcaagaccagcctggtcaaaatggtgaaaccccatctctaccaaaaaatacaaaaatttgcagggtatggtagcacatgcctgtcgtttcagctatttgggaggctgaggcaggagaattgcttgaacccaggaggtggaggttgcagtgagctgagattgcactactgcactccagcctgggtgacagagggagactctgtcttaaaaaaaaatagctacctgtttggagaaaggtaatataaaatatgtaaatagagacaaagtcaaaatttgcaaaggatgaaattaaagagtagagtttttttggggggttttctgtttctattattttatttgtgatctaagataagttgttaccttttcttctcttgaagatactttgttatatctatgtttttggaagtcttatggtaactgcaacgcaaaaaatctatgatagatccactgaaaataaaaaacaatgacttaaaacatactaccagagacaatcaaccacaaggaagacagtaaaaaatgaagaaaggaagaggggagttacaaaacaaccagaaaacaggcaacaaagtggcagtagtaagttcttacttaaaaatattgaacactgaatataaatggactctattctccaattaaaaggcatagagtggctgaatgctgcctatatgctgcctacaagaaaccacttcatgtaaaaagatacaaatagactgaaagtgaagggggtggaaaaagatatttcatgcaagtggaaaccaaaagagagcaggagtagctatactgatatgagataaactacaaatcaaagactataaaaagagacaaagaaagtcactatgtaatgataaagcgctcagttcagcaagaggagatgccaattataaatatctatgcatccaacacttgagctcccaagtctcccaagtatttaaagcaaacaatagtggatctaaaaggagagatagactgaatacaatattaattaggggactttaacaccctgctctcagcaatggccagatctttcagacagaaaatcaacaaggaaacttcaaagttaaactacacactagatcaaataggcctaactggcatttacgggacatttcactaactatctaactgttacagaattcacattattttcatcagcacatagaacattcttcagaacagaccacatcttaagtcccaaaaccagtcagaataaattcaaaaaagtttatatcacatcaagcatttgttctgaccacaatggaataaaactacaataaatgaataactttctggacacatacaacctaccaagatggaagcatgaaaaggcagaaaaacccaacaaaccaacatgaaactgtaacaaaaggaaaacccaggaccgaatgacttcactgctgaattctaccaaacatttaataagaactaaaaccaattctactcaaaatgctttaaaaaattgaagaggatggaacactttcaaactcattctacaaggtcagcattatcctgataccaaaaccagacaaggacaggacaaaaacaaacaaacaaacaaacaaacaaacaaacaaaaaaacactacaggattgcttgaggccaggagtttgagatcagcctgggcaacatagtcagaaccaatctcttaaaaaaaaaaaaaaagaaaaaaattagccaggcatggtggcatgtgcctttagtcctagctactcgggaggctgaggtgagaggaccaattgagcccaggaggttgaggccgcagtgagccatgtttgtgtcactgtactccagcctggggaacagagcaagatgctctctcaaaaacaaaaagcaagctgggtgtggtggctcctgcctgtaatcacagcactttggaaggctgaggtgggagaactgcttaagcccaggagttcaagaccagtctggacaacatagggggactccatctctcaaaaacaaccaaccaaaacaaagccaaaaaagaacataggccaacatcactaacaaacatagatgtaaaagtcctcaataaaatattaacaaaccatgtttagaaacacatcaaaagagatcattcactatgattaagtgagattcatcccagggatgccagtatggctcaacatatgcaaatcaataaatgtgatccatcacattaaagagaaccaagaacaaaaaccatataatcactccagcaagtgcagaaaaggcatttaataaaagaatgggttgagggagtggagcccatagtcagagcagcagtggtctgggattttggaagtagaaagaagggcagcaccactggccaggaccaccagggaacacccccataggccctgggtgttgtgctccagggagggttccctctggagttattaatcttggtgtccactttgcccagctgcccctcacagggtcagggaggatgaagggaaagcttccttctaatgaaagttcagggactcacagttcctagagcctgtagggagaggaagatcttcgaggaagagcacctgggcattggggcgtttgagaggaagatctatgccaggtccaagtggacaacctgtggactctctctccagggacatacgggtatctgggaatctcctgtagcttaaagaggtaaagacctctccctttagcctgaggactggaggatgctggttcaggtgaatgagtcctgcaggggctggtacaggcctggagggtggtggtgtccagggccttgggttcacccttagcatgattcaggccgggcggtgtttcacatgagcaagagggcctgggttcattgcttcaggacaatggtgaaatctcatggtggaagaaatcttgtccttgccagtgcccagctttcatttggtcttggcccagagtgtcctccctagagaagactcttgtcccttcttcacactgcccttcagggatatgccagccttatgggataagatggggtggagactgtagatgtgggtgggaatctctccacagagtgctccttctctcagcggttgcaccttgtctcagggcttcagcttgaaatctgggatctccaagcccttccctccccagtcctggccaggaccacatgggcagatgcattgtgtgaagtgcatttcatttggggtgtcctctctgcatggcaccctcccgttgattctctttgcgcatgtcagagtgcaggcaccatccacacctcctgctggaggagggacggagctgttgactcctgagagctgatcatgtgttcccaccctcacacacaatcatggtccatcctctgagggacatgtgttgccaccactgtggagatggtgcaactgacagtaacaaacagtaaaatctggtactgaatgggaccttaagccaacaatgacaatgtcattccaaggtgtttcatttttattgattcaatgcaagtcacctgatttcattgactattcacaatagctcgataaagtaaatgcatcatcaccaccactttaaagaggaaaaaggtgcttgggcagtttgtgactactgtggtggctgctgcattgctctctggtaaagccaagtaggtggtgggtgcggcctctgggctgggatgatccaccctcctggtggtggcaggggagccaagctggagccatggcctgtgcagtggtagcagctgaactgaccgctgctgcaggatttgcaagctgttacattttgcgaagccatgaagcacataaaacctcaagtagaacaagtgtttcaaagtctaccaaaatctgccttcagagattattactacagaggtggatatgaacccaaaatgacaaaacgggaagcagcattaatactagataatgaatgaacactagtaatagtagggtaagccctactgccaataaagaaaaaaataagagatgctcattaacatgttatgctcttaaatcacgcagacaaaagagggtctccttatatagtagccacaatcaatgaagctaaagatttactgcaagatcaagctaaaaacagtaggtgtataatgaatttttaacttcatattagtttatgtatatgaatatcaagtttttataataaaatgcctccaaacaaagaatatttgatttagggtttaataacttctaagaggggactcagatgtttcctgtttcacagtcagtctgagagggtcatttttcctggagctgacctgggtggaggcctcacactgatactccccagcatcctctctcctgatggggtttatgctgagcatacagtggccctgggacagctccattctctccatgagtcacagacgctggtcatggaagatccactggataaggttccagagtcatctgtggggcaggtcaggatcacaacatccttttcttctgtgactctggtgttgctgactcagatggggtcggagccactgaccctgtggacaatcagtggaggtgctcaactgaaagtgggctgagggcacgtcttctcctccatccctgggtccttaaggtaactgtggaccccagaccaactgacacaggagctagaaagaaattatttaggaagttagtgagggtaagagcgtccttggcaaggtttcccctttaacaaaaagcagcccaagataattccttttctaacaaagagcagcctgaaaaattgagctacagatgtagatgagcaagatggaagcttgcacaggtgaattccagtaggtgtgccaatagaaaagggctgcctggaagccaggtatgttcaacatggagactccatcctcccttttctccattaccacatgtacagtaaaaaaccaggcaacatggcaccggccaggtagacaatccatctgcatgacaaaagatcagagtggggcagccagcaaatggcacagctggtctaaacaatctttcaccccctgtataaatcagacactgcctcctgaagctcatctataaaaccttctgcatttcactatggaagtggcaacccattttccccaggacccctctctctgtgcagagagctcttctctttctttcccctatgaaacttccactcttaacttcactctgggtgcctgcatcctagttttccatggccatgggacaatgaacctcgagtattaccccagatgaatgatgctgtttcacaatcactggttcagctcccttcttcttagggtttcacagctcggtggggagaataccacgcctcagtggtctggggagtgaggaacaaatgaagaattaatcagattttacttagaacgctatcacctgcctcaaccatcagatccatgttgggaatgtccaggcctcctctcttagatctatacccacttcactggacctgaaatcctgtgtttcccgatgtgttggtgtcactcctatgagaggataaaggagagaactttgctttctctccccactcacaccctgcacaagacagggcccaatatgagacacacactcgctcagtagttctctcatgaaggagggagggagtgacctcgagtgattctgccatctgtagtctgtgtaccctggccagtggctgtatcttcatatgcctcagtttcccctcagtaaaataggacacacaatgagaactaaaaataaaattctaattccccagtgaactgaaaggatggcctcttggccaagcggatcccagagttcctgatcatgacaggatgggaggttacacctcattacagcccctccctttggaagtttagaggtgacaactgactagcattaacgctaaaatcgagatcatgagactgacagaacagactctctgtggccataagataccaaattataaactcaacctaaggtcatgcaggcaagggctaagccacactttcctacatttaaagaataagctatgttctaacacagaattttctttctctctagcggctaaagtaacactagccttcgagataagcaatattgaaatgatcgcggctcatccaccaacactggctaactgacccctgttccaacagccacaactacacttcaattggacaggagactgatttcagtaactttctcctaataagagaccactgagcatggcctggttctgctggtatacagacacggtgcactgagtaccataatgcttgtttcatcttttgatgtataagacctaatttaatacatttaaatctgaattctccaccccaaagtgaacatggggtgcatgtagcatgcatgtttgttgatcacgcatgtgcgtgtacttcctttgtgagtatccatagctccacctataacctgttgaatatgtatacctggccaactcattcagcataaatctatcttccacattcccctcccttgaagtgcctgctattggtctctgctggaggctgcatcttctaccctggggaatggccagcctgcaggctgtaaccctgtgtaagaaataacctggttgggtgcagtggctcacacctgtaatcccagtggtttgggaggttgaagtggtagaatagtttgagctcaggagccagagactagcctgggcagcatagcaagatcctgtctcttaaaaaaattttagggaggagagtgaggatcagaaaaaatacctattggctattatgcttagtacttggatcatgaaataatctgtataccaaacccctgattacatatataacaaacctgcatgcgtatctttgaacctaagataaaagtttgttttaaaaactatctgggtgcagtggtgcatgcctatagttccagctactcgagactgaggtgtgaggagtgcttgagctcgggggattgaggctgcagtgaattatggtcccacctgtgagtagccacttcactcaaacctgggagacagagcaagaaccggtctctaaaaaaaaataaaaatagaaaaataaaatgaaaaatatatgaaataaagtctcctttccaaacgtacagatctccgatttttctgccaacaatgataaatggtcagtggcttgccatgttgtctgtgaattacttttaaaatattcacgatcacctgacctaaaggttggtaccaaggaaccgcctgaatacaccgtctctgattatttgcctccaacagagtgttccctgggcctgatctctggtggacaatgagctgctgggaacatcctctcttctctattcctcccctggggatgctgaccttcccttggagtctcctaagttccccagggcagtcggctaatgtcctagggagcttacctgtcttctccataccaagtctcatgtgaaggacgaggctttgcccttgcccagatgaggctctgggggctgagccctggctggctaccagctgcaagagccatggcccttggacagctggtaaatccttgttcccagtcagccctgcccaagatgcctcaacccagccccggcacaggcttcccagggtcacatggagtcaggatcctgggacaggggactggacaggggtttccagggctgagtttctgaacaggggcttcccaggggtcccctcactccaggatctgacatggtcctacaaggaacgtccatggggaggggacccaggagggggaactgacactgacctccccttactgagcctccccccaaccccatcagactgtccttcctctgtagcaagtgcctgcagggtctggatgcaggaaagaaattctgatctgtggaagtttgtctcccctgtgtgtgtcttgcactaaatgtccaaacccccaaatgggatgtaatgtagagggggacacaggcacagcccaggcctgaaaatcctgtgtgtgtgaagcagaactgacccccaacacccagagctcatgagacatcactgtgtacgtgaaactggccagttacttcttcattcacaagatctgtttttatgacttgtagggtgtaggatcctgtgtcattgttggtgacattctgtatcagcagacatgtattggggtatattgtctctcagcctctgtggcaggtcctggggtaattacttgagttcctagtacatatcctgtaattcccctttgtaccagttgtagccaagcctaaggcagattgtgggtgagtggaagaatctccttgccttctgcagcttcaacagtgacttgggcagtggtaggcaagttccagaaagttaaaagtgaggctaggagtggggagagagcatcagttaatactgggccctatgcattgaggtggaaagatggggccctaggtcctggacaggtctcttcatccctcagccttggagtgtgtgtgtgtgtgtgtgtgtgtgtgtgtgtgtgtgtgtgcgcgcgcgcgcgtgcgtgcgtgtcctactgggccaaggtcagcagcatgacctcccttccttcagtgcctctgaccttggcatttccctgtttggagtccttttccccaggggtctgcctggctccctccctactgccttcaggtcctgctcacattagggcatccttgggagaccccttccctgacacctctagagaccctgggtcttccctttctgacctttcgctgctgtgttccctccagggctcttgtcaatacttgacctcacattctagatacccttgcatgtctgtcttcctccctatgagagcatgagctctgtgagaacagggacttgtgtgatcttggttgcaccccagtgcctgggacaggctgcggactcctgtggatgagctcatgagtgttcccagggcccttcacaacgtgggatttattttccaatggctgaggttgttggctaagagctctgttggagttcaatcaggctggtgggaaaaatattagagatagttatagagatagacacaaatcttcttggaagaccaaaaagtttgcataactttggtaatagatctgactgaaggtggtccctttacctttagttaaacaaattaaagtagtaacaaaggaaggcagagtagtttgtctagccagcttgtttactcatgtgatcttaagactaaccattgatgtgccacaggtgcttaattgctttctacttgggaagtccacaatgtcaattaccctctaacggtgttgactcaagcctttgttaattaatcttactgaataaatatgagtctcactagctgatcaaggccatggtcacaactgtttataggactcagcagggagtctgtaagcggccctgacagactcagctggactggcaaagcaaaatatgtgtgtgtcagtgtacactattcacccgtcccccacagctggtgcccctatatgaggagtgctgccacagagctctgtttagtgtcccttgttttttttcttgagtattaccccaacttaaattgtgattattgtcatctgttttcaacattaactgctcagtgatgattcacttggaaaacattaacaatcgagattgtttcttcactaacaacctcagattatttagattttcctgttgtaatcccttcttcctgtttagtgtccaacagaagccctctgtccctctcaggtccccgttctctccaagaaaccccagccagtctctgtgctccctcctcccatccactcccagggagccctcccctcacctgtgagcagaagcgcctgccagggatgtgcactctgtgaggaggggctgagggaggccccatgggctctgctgtctgctttgtcctcctctgtggagaggagcttgggcttcagaaaataaggaggccagaaagtaaggaacaggctgagaaataatggggatgtgtcgaaaggtcacagatgccaacatctttgtcctatgcaatattatccataaaattacaggtttgagatatgcttaaattttcttctaacatgcattaaaataaacatataacttttaatagttatattaaattgtatttaatataaattaaatgctcttgtcagagctactgtgactgtcagctctgctgtccttcctctctctgtgctaagcctcctcccagggcagaagcacttcccagggccaggggtgggggcggggaaaggtaagtggcaatgaggatctgcacaggtagcctttccgcctcctcccctctcagtcctgcctccttgtcttcttttcctctttttctccaatctacatttcagttccttagaccacgctgtgagaagcaaggcttattgggacccccatcccttaacaggatgacctgtgctccccataagtgacctctgctgtgtctagggattggctctgtcagcacctcacagagagtccctggggcccccaaactcagtgttattttctctatgacacagaaacccctctgggtatgcaaggttttcctcatgttttctaatgtctgggaaggttggatttactcccagcagggaggtcacagagatgtccagggagtggggtcctagaaatggacaaatctagagctaaagcccaggtctacgattttcagttgtttttttctgcagtgctatgtgaccctaatttcctaggagtaactaaaatgcaaacctcagacatttgtagacattttatgatttttctctacagcttgtaccactgttattattatttgctttatgctttttcctaaataaatttactttacaaaacatccttgtcctagtagggtgcaggggctcacgtctgtgatctcagctgcttgagaggttgaggtgggtggattgcttgaggacgggaatttgagacaaaacatctttgtcctatgcaatattatccataaaattacaggtttgagatatgcttaaattttcttctaacatgtattaaaataaacatataacttttaatcatcatattaaattgtatttaatataaatttatatacaatacatttttatataataaattatatatataaatgtatatataatagtttttcttttttgagatggagtctggctctgtctcccaggctggagtgcagtggcacgatctcagctcactgcagcctccgccttctgggttcaaacgattctcctacctcagcctcccgagtagctgggattacaggcgcctgccgccacgcccagctaatttttgtacttttttagtagagatggggtttcgccatgttggccaggctggtctcaaacacctgacttcaggtgatatgccgcctcggcctcccaaagtgctgggattacaggcatgagccaccatgcctggcctatatattttatataattatataaagttttctataataaattttatataataatatataaaatggatatttatttaagataaagttattagttttatatatttacatatatttaggaataaatgtgttactgtgggagcccagtgcccaggcaggtagtcagtacatgatggttgtcattagggttaatactttggaattctggattttttcccaagagagtgtctacgctggaatattgggcttgtggctttctgctgatgtgcatgtgtgaagaagctacttccacttattaggacttgtgtatctgtctcgcagtttcactacctattttctcgtgatgttggtcaagtcgcctaacttttctgtgcctcatttacctaatttgtagaatatgggtaacagtacacaagtgtgagtgtgtatttcccaggactgaccactagagggcgtgaaggcaccggcacttactattacagcaatgggtgtagtagtgctcatggtcgtaaacatcattctcccatgaaaggaaccagggcttcctgggagaaataactgattccagggctggggccggaaagcacaagcggagcctggagcatctcgtgaggccagaaagtaaggagccggctgaaaaataatggagatctgtcgaaaggtcacagatgccaaccagaaggagctttgaatgaccaattttgagacaaaatgagcactataagaaataatgatagtaataaattccaacccataaatacccatgagttcctactaatataaataaataattgaatacataaatatataaggatgaagaaacagctttttcttacagcagaattccaattaatgaatgtagaaggaatgatcaaatagaaaatcactatttggctaacagcacagtcaattgtttgtaggcaagaattatcaatggactttaaatatgaatgggtaaaagtatgatgatgctacaactagtgagtaccaagggggaaaaaaaagtacgttgagaagaaacaggctacttccatattcccaaagtatcacttcaggagctacttattgattataatgggacaaatagtaacttacagtagagaaacctggcaacagagtctctccgaggtacaaaggctctcttcaggaaggaggtaaggggaaggaagaagaaaacactgtcctgcctcaattatttgctttccccattctcaagtgtacttcatagacattcaaagatatgtgttgatagtgtccacgatccacatggctctattatagtcatttattcacacatacattcagtgaggctttgagtgcctaatgtgtgcctgatatttgctagatggtggatgctgagaagatcaggtgtgctgctgtctctagggtgactgaatccacctgccccactttacagatgtggaaattaaagtgaaaaggatttataggattagttcactgtcacaaggtcactagccttaaagttacaggagtaaagcaagtttcctgacttgctagattttctgctgcaggtgctgacaatggtgagctccaataggagagaggacactcagagtgaagtgggagccctgaacaccctggattagccaagaggacatgccgggtccagctgtgaccgcacaaaggaccattggggatatttgtattctctttttcacttagagcttgaaatgaggaaaactaagtgcagaaaaccaagagtggaagatttttcacaaagcactggtaacatgcatcagaaaaccctgtgctgatgtctgtcacggtgtttctcactgaacggtaatagtctggctttgagtgtgttccctctacagcctggagttctgcgaggcagggaccaggtgtgattcatctttgtctctccagtgacagtacacagcaggctctgataaatatttcttacaaaataaaatggaataaaaagtagacatctgcacaggtgtgggatgactgagcagcagcagaagcaggaaaagtcagcgtccccagatcagctgatgtggtgttcggattctagataggggtgaggtgccaggatggggatgggggtcctgtggctctgctgccctgggggacacccctaggtttcacagtgcctgctgtggttgctgcactttgcttccccatgggaaagtgatcagagggtgtggggcttcaggtgaccccatgtgggaaatggccaagggaaggtggggtgggcggcacatggttttttttaaccaatatttgaaggtaggttgtatgaaaaggtgttaggcttatttcagcttatggggagtaggacagggattggtgagtgtgtatcaggtatattttggctcaggatggaaaagaactgtcacagtaacataaggtcttttgggaaattacatgtttactggcagagttcaggccagggctgggtgtctgaaaatacctgtcagggtcacttttatggttacaagggcagagcttggcttggaaccaggtttcttactaataccacatattaagtattataaaaactgtcctttgcaataggacattgctctatgatgcaggttgaggtccctctgtttaagtaattgtgggtggctgtgattctctcatctagtctgcgacttggacttcacctccatctgcagtccctctcctttgctgttgacactggtcagagttaagcgcatttactgacgatggtcacagggtggcagcactgcctctctggtattttctaaaacctcttcctggaactgagccagtctaagaggatgtcatgactaagaaaagggcactaatgaggtgaacagataattttttttttcttgtttctcctgtgaagtaacagagtggaggtgagcatggaataattgccttttagaaatggaagacaatggagagaagtgtttcgcaaaccttaatgtgttcacagatcccacacagatctttttattcaatacagattctgatttttctggtgaggcctgagattgtgcatgtctaaggagcttttggatgatgccattgctgctggttggcggaccacactttgagtagcaaggctcgaagatcatttagaggttaattctcactgcatctaatttatggatgaaaacaaaccaaggtccagagagagcatatacagcttgcctaacaaagccattccctaagtgcctgacttcttgcatttaaacccagggcttcagcctttgtccagttctcactccacacatcacacggtttgttcactgttgtgaacgacagttgtggcagcatctctttagtttaggaatccagagccccaatttcactaccctctttggtcttggctcatgctgtgacttcgaatagttttgcccttacttaaaatcttcagtggctcttttgtaatcacaagatcaagttcgaatatctctgtctagtgttcatggctttataacatatggtatctctttagtaaccttacctaacttccctgttttaaaattgtctcttgctgccatagccctccttgctccttcctgctccctaacaaactgtgttcacttctctctcagtggtagtgatgatggcatggcctctgatgttagactcatgtaacttctaatcccagatccaccaccaacattggcaagttgattcatctttctgaggataagcatcctcctctgaaataaacttagatggcggttgagaggggtaaataaaataacacacaaacccactctcatccctgagaccctcttcaaaactagcatataaaaatagctatttgaagaggttcagtgaaattcaaggtaacacagagaaggaattcagaatcctatcagataaatttaatagactgaaataatttttaaaaatcaggcagaaattctgtagctgaaaaattcaattgacaaaccgaagaatgcactaaatctttcaacagcagaattgatcaagcagaagaaagaatttgtgagcttgaagagataatatatgaaaactcagagtcagagagacaaaagaaaaaagaattaaaagaataatgcatgcctacaaggtttgattattaagctactcaaagagatacaagagaagggtgaaaaccaacataaagaaatgtaaaaaacaatcagaatataaatgaaaaattttctaaaatgctagctagtttttttttgagacaggctcttactctcatcacccatgctggagtgaagtggcacagtcatggctcactgcaggctcaacttcctgggctcagatgattctcccacattagccttccaagtagctaggactaaaggcgtgtgccaccaggccaggctaattttttgtatttttagtagagatggggttttgccatcttacccagggctggtcttgaactcctgggctcaagtgatccaggagattcactgccaaaaaggatataaccaagtcatatagtcataggttatctaaagtcaatgtgaaggcaagaattctaagagcagtgagacaaaagcatcaattaacttataaaggaaaacctatcagtctaacaccagatttctcatcagaaaccttacaaaccagaaggtattggggtcctaatcttttggcttcttaaacagaatagctctcagccaagaatcttgtgtagagtgaaattatatttcaaaatgaaagagagaaatacagtctttttcaggcaagcaaatgcttcaggatttgtcacggctagaccatcctacatggaatgttaaagggacttctaaatcacaaaacaaaagatttaaatagaacagaatagaacctcttgaaaccaaaaaattcaaatggcctataaaacaataacacaataagaaaacaaagtagataacgatcaacatgatgactggaacaaatattaacattgaatgtaaatgacctaacactccacttaaaagacacagattggcaagataaataaaaaatcacaaaccaaatatcagctgtcttcaagagactcacttaacatgtaaggattcttatagactcaaggtaaagagatgataaaagatattccatgcaaatggaaaccataagtgagaaggaatagctatccttatatcatataaaacagactttaagcaacaacagtaagaaaaagacaaataaggcaactatataatgataaaaggatcaatcaaacaagaagatattacaatcctaaatatatatgcacctaactttggagctcccacattcataaaacggttatgatgagacctaagaaaaaagatcaacacaaaacagtgagggtgtcctgggttttctttttattggacagcagtgtactagcctatcactttcccagtcaggggatttttggtctccccattcccctaccatgggttcatgccaaagtccatattttttattagtgtttggaattggattttttttttttgaggtggagtctcgctctgttgcctaggctggagtgtagtggcacgatctcggctcactaacctctgcctcctgggttcaagcaattcttctgcctcagcctcctgagtacctgggactacaggtgcatgccaccacacccagctaatttttgtatttttagtagaaacgagatttcaccatattgtccaggcttgtatagaactcctgacctcatgtgacagggaaacaggcactcagtgaacttcatgcgattgaggagttaatgataatgagagaagggctgtgaggggacagcactggggacaccagagcctgtgacgggctgagttgctgtgccttgggagatgcccttttgactgagccctgggaaggagggggtgtgggggcaggagctgcctgcagagggagtggcctcaggtgggcggccacctggctgcagggaagaggtgacagagttcgtgtgcagagcttggagggtgaggaggaggtgggttgaggtgaccttggtgagggtgaaccatggggggctgtgggccctgctgagggaggccagccagccctggacctacagggtggtttggtcttttttgtcccattcccagcatccactgagtggtgaaactctgcaggccagggaccatcccactggccagaaggagcgcacagtaggtgcccactcagtgcatgttgggctggacagaacctcactctgccccctgcccccagctttgggagctgcagcaaggtccctccccctagggatctccatgcctctgtctctgaggggtgagatggggagacttcaaagggccatctcagagtgtgggggatagagacgcagaagtgtgggggatagagggaggcctgggctctagacccaaaggaccttacacacctcctgagtcttttcaaatggtttcttctgttactttaaaaatgatgtaagtcatcatatttattgtaaatcccaggaatctaatcatgcgtaaaataaggtgtcttatccttgaccccaccccttccccaattaaatttccaggatgttaccactgtttgcagttggtgtgaatctctctttaataatactctgtttatctcacttgtcgttttacgccaaaatacccattgaattatattattgctgaagaccattcttttttttttttttttttttgagatggattcttgctctgttgcccaggctggagtgcaatggtgtgatctcggctcactgcaacctctgcctcctgggttcaagtgattctcctgcctcagcctcctgagtttctgggattacaggtgcacaccaccacacctggctaatttttgtatttttagtaaagacagggtttcaccatgttggtcaggctggtctcgaactcctgacctcatgatccaccctccttggcctcccaaaatgctgggattacaggcatgagccaccacacctgcccagaccattctgttctactgaatcatgtgtggtgggcacctcttatatcaatacatatggattttatcttgtgtttgttattggctcccctttttctcattgcatggctacactcaatgctttgtccacacccctgttcctgggttggaatcttgtgacagaaaatgaagtaacaaaggctaaagctttctaaagtggagtcaggagattgcaagacaattgcactttcaccagcaagagctcaaaccacagaatgttccaatagatttggataaacagctgaagtcagtattcaccagccttcaacatctcaactaggagaaccctaaaattaactaagcacatagaatggaatggacttgtgatttaggattccttctcagccaatgagctgcttctgaaaacaactttttgtggaaattacctgtaaagaaaaccctctcctgtgcttgtcttacagaacactagtcagggctgccctgattcagtggacccgaattgctattatttgtttcctaaacatatggtattttctgtgaccttcatctcaatcttttttttaagttactgggctgtttcccagttttcataatgacgagacattctgcagtgtttcatacacatgtcttttccccatgtggagtattgatccaggagctcattcagtcaacgcatgtttatgaagcatcctgtgccaggctgtgggctggtcactgtcttcagcagagagaggacaggcacagtcttgccttcacagagctcacagctcagggaggctcttagaagtgggatactggtcggagcatgtgcacattaaacatgatgaggtcaaggttgctatagggactaaaccacagtcccaccaagatcgcattgagttcctgtggtagaccagaggtcagggcccctaagatgtcctgagcagctccctctgctcagaagttttggttccacaggtgacacacctgagcacaggtgacccctgcagaacctgtgattaccacccaaagccaagagtgagtggtgggtgttctaggaggaaccgtcacctccatgggcagggttggggaagactgaggggagcaggtggctgatgactttggccagaaggtagggggatgggcaggtgtgcgctcatagggaagggaagagaagggagggcattgcaggcaacaacacaaaggttggaacctgccttcatggactgagaaaagcagggagtccacccaggctgcagctggggagggaagacatggggagcagtgggtctaggggagaagcagactgcgattgaccttggggactgggcagtgagcagaggtgtgttatgtgtgtctgtccccatcatagatatgaggaggggtgaggccgcgggtggcacctgggtcggtgggatttcatagtgcctgctgttccctagagcctctctgtatagagggtcagaatagatctgaggctgtggtctgggggaaggggctggtggtgcttaccatctctaggggtgggaggagagggatgaggatgcccctgagcagtgaagcctcaaggtgtgtggagccacagttgtctctcattagacatgtgttttgcgtgaggatgccagggcctggtggttattactgttgtcaagtttgcatgacaaggacccaggtatccagggatccagagcacagggcccctggtgaggggatgaggctcagatggggctgaccaggttcatgtggtcagagtgggagggactgatggagagacagagcctcaacccctcctgtcaggagctgtggctatgtccaggagagatgacaaggatgacccaggacattgagtgagtcattgagacattgaaggtgaggacagggcagagaggaccctggtgactgctgaaatgtaggatgtgaggagggctctgacccatgcaagttacaggacctccccacccccgagcccacagatgacccttaaattgggcatcctgagtgctgtgtgtgcccagcagggacactggataggctggacctgagtctctgtaagggcagcgctggtctgtaggaccagagtcttctctgtgggtgtgacgtgggcaggaattagcaagatgggggtgacaaggcttggcttggaggatctggtacagaagcccatgggcttggtcagctcagcttctcaggggctcagctggggctggaggagcaggatgctgtgctcagggcatgctccaggcagcgtgatgtgtgtggttccagggtcaggcacgggggtcaaaaattaaccatgaaaagttcccaccttctgtaggcagagaaaatggcctgattgtcagggtcagggagacttaccatgtggccaaagcaggctctcagcctcccagagaccacaccctgggtgcagcactcagctctgcagggtatggcaatagatgtgccaagaaccccaacatccagatgcatgcaaaaattttgcgatatataaaatagagcagatcaagtttccctgcaataacgttgttcctggttgtgtctttttcttgtaaactagacatggacatctttccagcagtctgttctcatctgccaccttcctgctgcagcacctcagaatgaacattcctgagacactgtccgtggtgctgacgaccaagagctatggaacagagtgtgatgtagaatcttctagttacctctgctctcctttcacttttaacaacagagcatcattaacaatgagaaggtggagaggtgttcaggatcttgaagtgacttctgtcttgctctcccataaccctgaagctgctgtagacattattgcagaaactgacaccacagtcaggatggccttgtccaggagcccatgtgcagtttgtagtgagcaaggatgagaaaatggtcttgaaaggggtgatggacagaacaggggcttttcaaaaatgtcacatcatcacccccagcatccgtgaatctgtcacatggtaagagaccttacagattaaatgaaggattatgagtttggaagattattgtagtttatccagatgggtccaacataatcacagaatcccttccttacaaatgagagagggaggtgggagagtcagagaaggaggaggagatgtggggatagatgcagaagacagagcggtgtcaagatgctgcactgctggctttgaagatggagaaagaggacacagccaaggatgcaggaggcctctaggaggtggaaaaggagaggaaacgcactctgccctggagcctccagaaagaacgcagccatgtgggcaccttggttcaagtttctgtgtcacttagcttgtgggaatttgtcacagcctcaacaggaacctacagaggagtcaccttgtgtgcaggtgggatccagggtcatttacagctaaatcctgatgtaaatattgcaggttgcttttcctacttcctatctcatggccaacaaccctggacaatggcagaacacccttggaaaccacggctctgtgctttagtggagggaccagcttgtttgtgggaaggtagcacctggtccaagtgaacctacatgagatcgttactctccccagggccctcagggaagggctgagaacagctggcccaggtgtgtggaggagctgcaggtgaggcagggctggaggggcctgtgggtccaggtagaggggcagacaggttgtcccatcgccatgggagcctgcacgagctttaggttggggaaccctgctcctctgacctggacgctcctgtgtggagaggaggcttgctcagtgagatccacgccagggggtaaattgggaactgatgggaaatgaggggctagagtcctgggtagtgcctgggaggaccttgctcaaggactgaattcttggtctgttcccaccttggttactctgacaacccctctctgtgtcccacggggataaagatctcctgagcagtggccattgggacagaggagaacctggtggccagagctaagcatccaggatcctggatttggggacaggcaagctcattgctgggggacagtgatagatacggcctccagggcctgggtgaagagagcaggagggctcaggacactggaggctgtgtggaggtcacacccacgatctgtaccacccatggatgctcctgcattgctcacctttgtgtggacatcagatggccccaacttttgcactcctgagacatctcatgcattcacagagggacccaggctggggctgtgcatggccttggtctctagggtagtgtgaggacagctgagcactcagctggctgggcaggactcctgcgaatcctgccctttcctgtgtagggtccaccccagcctgactcctaaccccctactcctgtctttccagggaagagagactggggttgagataaggtggagatatttttcctgtgtgacccaggagagaatggacatggagtttcaggtgagtttctgctaagttcccatgagcagaaaaagagccaatgagaggaagtttcccctttattcagatcctttccaggtgaccccgggtgggccataggcccattcactttccctgcaagcccccgcttcctgtggtgatgggaagccttcgccttggcccacccagagcccggggcagtctgttgaggtctctatatattcagcagggacccccatcccttcctgtccccaggcctgtgtctcctcaggactcagagctggttctctggctcaggctccatgtccttccccatccccagggctgggggcttcagggacgctccatcaacccacaggagcagctcccagaggaacctaagaagccacatctgctttgtggtcgatccagcagtaaatgtttgtgtcagagtgtagcaattccagtaaaaacagagaagaggtcttgacccctgaggccttctcagaacagggtctggcatctctctctgggcccacccagggctactctgggactgaacctggctgtgctcagggggttcctgctcccaggcccctccctcctctgctcaccacctcctgttattttcactgcagtttcctgaacttcagctcagccagatgccagtggggacagatcctgggtctccctggggcccaagggaccagaatatctgtggcccccactcacctcatagatgagagcagctgccctggtgctgggtaggggaatctgggcaggggagagaggggtgtcaggggacagggaaggattcctgctgtgtaggaattccagggctctcctcaggtgatggagggtcccagggtggggttagcacagggagtggatgatcctggccctgaacagaggcccagctcatggccagggcaggtctaaccttatccaagtcattctgggtagggtgggtttgtgctggggattgacagtccccctgccctgagcctgcacagctggggccccagtggaaatgggattgggaacggacagtcttacctaggagatggagctgtcagagggtccatggcctggggacagagacaaaagtgagcacgagagtgttaggatagctgggcccctcctgcaagagtgtgtgggggtcctcagttcttagagaattggggagagggagcctttctcaggttattttaggggtcaagtaagcaagtgaggttgaggaagtgacccatgacccagagcccggaggttagggctgacccggccagttggggtttcctgtgtgatgttttatgggatcctctttgcagccccagggatagggtcagaggcccctgggtgtaactggcaggagtggacaacttggggctggcttagtagttcccagccacacccagactgaagggacactcaccgggggtggaggctgggggctgctgctccctgaagtcactctgatcgctggccctaggaaaggtcagggttatttgtgaaggtgcaaggttaaaagtcacaaattggagttaaaataggggaccaggaaaggagcctatttccaagaggggtatggagacctcctttctttatggagttctgtggtaggaggggcccaggtgaggggagttgaggaaaggccttacaaagccacatctgtcctggccagaggggaaggactctcaggcagatgctgggccaggagaacattgatccagtgacacaggaaagggactgaggacccagggaaggaatcagaccaccaggggttgcctgagaggaagggtcaaggcaccagggggaaagcagggccaggcacatgtgcaggacactgaggggactgcatgcatcttggattctcctggaactcagtgtccctgctgtgaccagacactccactcagggctggagatgctgaaatgggacaatgatcttgtcttctgtctctgccctttggcaagagacataaacgacattccaggatatgccatattggggccccggttctcccttctcacagctcagtgtctgcagttaccatgtcagtcaaaggggtgctgaccccacccagcccgtccaggctgttccagtctccactatgtgataatgcccaggatcccccctcagatgccctctcactgggtggatggattcagtgaacagggggaggtaccaggtattgagcaccgctcccccctgctccaggcagctgtggctttgctgtgctaggaaactaggaccatgctcaggggcatggccttaattggactgaattcactgaggacaaagctgttgaggaagcagcccagggtcagcagctggtgaggaaggtgccatggaatgagagggaaggatccctggggagtcgggaggctggggagagcctggcactgaatacaagacagggtctccttccttctcgcctggggtcagcgtgaaggatgggagcagaatggggaaaagctgtggtacctgccagtttttcggaggagcaggaaacacacaagtgcagccaccagaagactcccaaccaggaccccgatcaggatgcctagagtgttgtcatctgctgaaagaagaaggcaaaggggatgaggtccaaatctgttccagggggaaccatgaggggccttgcagggcaggggcatggtcagggaggaaggaaatgccatggagcctgagtgtggtctgttgtgctgtcctcatagctggctcccttgctctccgtggttgcaccattttctgtgtcttaggcttgaattactgggatgcatcaactcctacattctcccacaggaagcctgcacctcatcctgctcctgtgttttttagtccctccttcctctcacatcactcctcttccccctgtttctttttttccatcccatggcagtcgtaaagggcaggcccttgctgccaactcaatgctgatgagcagggatgatgttcattgactgttttcaggggccttccacatggaaggcacagtgggaatcaatctacctgcagcttttctcaccctcccattgccttgagggagaagggtatgtgatattgtgaaatacgtatttggtgttcatcaccattgatatggttaggctctgtatccccacccaaatctcaccttgaattgtaataatccccatgtgttatgggagggaccttgtgggaggtaattgaatcatgagggtgggttttttccatcctgttcttgtgatagtgaataagtctcaggagatcagatggtttcataaagggaagcttccctacacatgtcctcttgcctgctgccatgtaagacatgcctttcaccttccatcatgattgtgagacctctccagccatgtggaattgtgaatcaattaaacctctttcttcatacattaccaagtctcaggtatgtcttcattagcagtgtgagaatggactaatacagtaaattggtaccagctagtggagtgctgctataaagatacctgaaaatgtggaagtgactttggaactgggtaacaggcagaggttggaacagtttggagggctcagaagaagacacaggaaaaaagtttgaaacttcctagagacttgttgaatggttttgattaaaacgctgatagtgatatggacaataaagtccaagctgaggtggtctcagacagagatgaggaacttcttgggaactggaacaaaggtgactcttgttatactctagaaaagagattggtggtattttgcccctgccctagagatctgcagaactttgaacttgagggaaatgatttagggcaactggtggaaaaaaaattctaagcagcaaagtgttcaagatgtgacttgggtactgttaaaaacactcagttttatgtatttacaaaggtatggtttggaattggaacttatgtttaaaagggaagcagagcataaaagtttggaaaatttgcagcctgatgatgcaatagaaaagaaaaatccattttctgaggagaaattcaagccagctgcagaaatgtgcataaacaatgaagagcaaaatgttaatccccaagacaatggcaaaaatgtctccagggcatgtcagagaccttcctggaagccccttccatcacaggactggaggcctaggaggaaaaaatgtttcctgggccaggcccagggctcccctgctgtgtgcggcctagagacttggtgccctgcatcccagccactccagccatggctaaagagggccaaggtacagctggggccatggcttcagagggtgcaagccccaaaccttggcagcttccatgtggtgttgagcctgcaggtgcacagaagtcaaggattgaggtttgggaaccttcgcctagatttcagaggatgtatgaaaatgcttggatgtccaggtgaaagtttgctgcagaagcagagccctcatggagaacctctgctagggaagtgttgaagggaaatgtggggttggaaccccgacacagagtccctactggggcactgcctaatggagctgtgagaagaagaccacaatcctccagaccccagaatggtagatccactaacagcttgcaccatgcacctagaaaagctgcagacactcaacgccagcctatgaaagcagccaggagtggggctgtaccctgcaaagccacaggggtggagcccaaggctatgggagttcagctcttgcatcagtgtgacctggatgtgagacatggatacaaaggagatcatttcagagcattaagatttggctgccctgctggattttgggcttgcatggggcctgtagcccctttgttttggccagtttctcccatttggaatgggtgtatttacccagtgcctgtacacccattatatctaggaagtaactaagcttgcttttgattttacaggcttataggtggaagggacttgccttgtctcagatgaaactttggacttggacttttgggttaatgctggaatgagttaagactttggggaactgttggaaggcatgattagttttgaaatgtgaggacatgagatttgggaggggtcgggtggaatgacatggtttggctcttcttcacccaaatatcaccttgaattttaataatccccacgtgttgggggaaggacccagtgggaggtaactgaatcatgggggtggattcttcccatgctgttctcatgatagtgaataagtctcacaagatctgatggttttagaaaggggagttcctctacacatgccctcttgcctgccgccatgtaagacatgccttttgccttctgccatgatttcaaggcctccccagctatgtggaactgtaagtcaattaaacctcatttttaaaaaaattacccagtctcaggtatgtctttatcagcagccaagaccagctcggtcgcggagatcctaacccagcagtgctagaggaattaaagacacacatagaaatatagaggtgtgaagtgggaaatcagggttctcacaggcttcagagctgagagccccaaacagagatttacccacatatttaataacagcaaaccagtcattagcattgtttctatagatattaaattaactaaaagtatcccttatgggaaaccaagggatgggccgaattaaaggaataggttgggctagttaactgcaacaggaacacgcccttaagatgcagattgctcatgctattgtttgtggcttaagaacgcctttaagcggttttccaccctgggtgggacaggtattccttgccctcattcctgtaaacccataaccttccagcttgggcattagggccattatgaacatgttacagtgctgcagagattttgtttatgaccagttttggggccagtttatggccagattttggggggcttgctcccaacagactaatacacccattttctggtatgtgactctaaagtccttagaatcttcaaagtgatgtctttttcaagctaataattgactgatgactggcagcccctaggcaacttcagaatgaggctggtcactgacccaggtaggattagagggttgggactttcagcctcacccctaatccctggggagggacctggagtttgaattaatcaccaatgaccaatgaatcaattaatggccaatgattgaatcaattaatggccaatgattaaatcaatcatatctatgtcatgaaccccaaaaggactgggtttgaagagctgaacccatggaagtttctggagtgtggtgcatctggggagggcatggaagctccacaccccttcccacatgccatgctctgtgcatctcttcatctgcatcctttgtaaagtcctttattacaaaccggtaagcctaagtatgtgtttccctgagtcctgagagctgtttgagcaaactaatccaacccaaacagggagtcatggaaacctcaatgtgaagccagtcataagaagctctggaggcccagacttgtgactggtgggaaggtggtggcaattttgtgggactgagccctctgctgatatgtccaggtagatagtgtcaggatggaattggaggacacctagctgatgtacggtgcagaactgattggctgctgggtgtgtgggagaaacccccccgcatcacatttggtcacagaagtgtgtctgtgttgatgattgttattgtggagtgagagcagaggaaaaacacagtttgagtttttccaaacagggtggaatcccatctgccaatttagaatctgaaacttatagtttcagtacttcaattaagattgaagtacttcaattcagtacttcaattaagattcagtacttcaattaagattcagtacttcaattaagattacagaactggtaagtgaaagtgatacaacaaaaatgtaaccaaagtctgctcaacttaacagctaataacaacaaagttcataaaaataataccagtcgatattgatagcactgattgagccctggctctgtgcatgaccttgttaagggctttaatcgcattaatctctgaataaatatcctcacaaccaccctgagatccaggtgtttgtaacaattctacagatgaggaaactgaggcccaggaggttgagtgtcttgcccaaggtcaaatacctggtacctattgtaaccaggatgataactggatgagtctaatccctgagttcttacccacattgctccccaggctctgaaggaatctcatccttctcattccgtgtatcattttacaccccccctccctcctaggaaaatatacaaggaaaggagtgagaggggccgagggtcactcacattttacagtcagcttgagggggtcgctcctgttggagctgactgggttggagacctcacactgatactccccagcgtcctcctgcctgatggggtctatggtgagcatatggttaaaccaggacagcttcatcctcttcgtgacctgcagacgctggttgttgaaaatccactggaaagaggttccagtgttatttgtgtggcaggtcaggaccacggagcccttctctgtgactgtggtgctgctggcttggatggagggctgagccactgactctgtggatagagtgaccaacagaaagtgtcttggggccatgctgcatcctcagagatctcagagtcaaatttagaacattctcctgtgaataaaggagaaagatgaaggacagggaggagcagagagaaccagagacacccatagcagcgagcagtagggactacagtgacctcagagaccccagggaccaggaggacccagctgcctcagaccaggaccagggagccctgaaaaccctcccacagatgagcggccccagagtcacatgagatgcaatacctggggtggctttaggagcaggcagtcagagaaatggaacatgggtctcagcccctaagggacaaggaagaggtgtggccagctcctcctaggatcctacatccaggacccagtctgtaaagaggttatgattattcctttcttttttcattaattccctccctccttcatcagagaactactgagtgtgtgtctcagttgggccttgtgcaggtacagggtgtagtgggaagagaaagctgagtcctttccttcatcctcccatgggagtgacatcaacaaatcaagaaattcatgatttcacgtccagtgagggaagaaatgtggatctgatgggagaggcttggacaatcctggcattgagtctgatagttgagacaggtgatttcgttctaagtaaaaactgactaattctccatttgcccgtcattcctcagaccagaatctccctctctgagctgaggatgcccaagaagaaaggagctgaaccaacatctggtcctggggtccacagatgccccacggtggtggccacgaccagattctgggctgcagacacacggtggtgtgacgttgagcactgacagcctgtgtgatgctgatgcaatttctctttaataaaatggggtaaatgtcaatggtccctggcttgccatcctctctgtaaattaacattaaaatatttacaattacctgacctaaagcttggcacagaatagctccaaataaacatcatctattattattttactccaaaaaaaaaaaaaaaagagttctctgggcctgattcctggtggagaaggagcggtccagagtgtcttttctctgctttccctcctcctgaggacagtgcacttcccgggacatcttttaagtttcccatccagtttaatggcctgggaagtttgtttgtctgtcctctccactctgactctcaggtgaaagatgaggctctgcccttgcccagatggggctctgggggctgagccctgcctggtgaccagctctaggaaccacggccctgggacagctggtaaatcgttgctcacaatcagccctgcccaggaagccacaacccagccctggcacaggctccccagggtcatctggagtcaggatcttgggacaggggcctggggcaggggcttgaagggctgagcttctctcagaggatcctcaggccaggccctgactgagtcctataagatctttctcaggtcatgtctatgaggaggaggccaagcggggttggactgagactgattttcccccgctgcatctcccgcatcagactatccttcttgctgtagggaatttccacggagtccggataagggaaaggaattctgatctgttatagtttgtctcccctgggtgtgtcctgcactaaatgcccaaaccccaacatgggacgtaatgcagagggggatgcaggcacagcccaggcctgacaatcctgcgtatgtgaagcagaactgacccccaacacccagaggcacggaggaatcactcaccgtatacacggagatggtgagatgcctgttcaatctgagaatttctgtatgtgacttgtagggtgtagtatcccgtgtcctctagggtgacgttctggaaatgcagatctccactgggtgatattgtctctcgaccgctgtatgcaggccctggagtcctaacgtgagtgtctattacatatgctgcgattagctggttgggctccaccgttttccctttgtaccagccatagctgtaaagattctcgggcagataaaccacagagagatgaacattctccccttcagcaacttcaaagggcgctgatgcaataaagagccaggcagtggtgggtgcgttccagaaagttaaaagtgaggctaggaaagggagagaatatcagtcaatatttgacctatgcattggcatggaaagacggggtcctgggtgcaggtctcttcacccctcagccttagagggtgtgtgtgtgtgtgtgtgtcctactgggtcaaagtcagcagcatgaccctcattccttcagtacctctgaccttggcatttccttgtgtgaaccctctttcccaggggtctgcatggttccctccccactgccttcagttcctactcacacaagggaatccctgggagacttctttcgtgaagcctcctctagagaccctgggtcttccctttctgacctttcccagctctgttccctccagggctcttgtcagcacctgacctcacattctagatctctttgggtgtctgtcttcccccccatgagattgtgagctctgtgagggcatggacttgagtgatgttagttgcaccccagtgcctgggacaggctgcagactcctgtggatgagttcatgagcgttcccagggccttccatatcctggggtttatttgctaatgtctgaggttggcagatgaagacagagtttcatgccctggtggtgtttttatttaaattgtcactgtgatatagttttactatcattttcaaaatgtagtggccactgacaatgaacttgaaaacatggaccaactgagattgttttgccccttggcaattccagttcacttagattttttggttctccttagacgctctctcccctgagtctctaacaaaagccctctgtctcctctcagagccccatcctccccaggagaccccagccagtctctgtgctccctcctcccacccactcccagggagtcctcccctcacctgtgagcaagagcccctgccaggggatgcattctctgtggggacaagctgaggggggccccatggtctctgctgcctgctctgtcctcctctgtggagaggagcttgggctccaggaacgctctagacagggttactgtgactgttgtctctgctgtccttccttcctctatgctgagcttcctctcaggcaggagcacttcccgtttatgggcaagggcggggctctgcctacaatgtctctctgtcccctcccctctcagtcctgcctcccttgtccctcctttctccttcctttttgcctatatttggttccctaggcaaaactttgagaagcaacgctgatggggtcctcataacaggacgacccactctccccagtactgacctctgctgtgttctggccttggttctgtcacagccggtagattatttccctttgtgacacacaaaaccagctgggccctgggtctcctcatgctctccagtgctccaggaaggcagaatgatgcccagcaggaaagtgacagaggtggctctgggggctagaaaggggctcactgggtgatggctgggaaggacccacccgctatcttcagtgtcaccagcctggcctctgacccagggacagagacccaggcctggaggtctcgggaggatccccagctcctaggtgtggagggaggtgtcctgtgtgtcctgggaagagaggactttgatggaaggaggtgggaggctctgggttctgctgtccttggtgaaggtttcagggggaccctctccatgtctggggtctgtgcccccagcttaactctcattctctttgcaaatacatatattttgtggatctgcagttgcctgaactgtctcatgtccctaaatctttgtatccctttttacagaaggtcaggaagggtgtgtacatgagtatgaggactatctgatcagggcgagtgtttgtttcccaaagatctctttagatatggtataatacataagataaatgtactgaattagcaattttaagtgtagaattaaatgatactaattctattcacaatgttgtacaaccatcaccataattttttaccagaaaatcttcattataccaaatggaaacttcatacttttaatcaataactccccacttccccctgccccacccactggtagcctctgatactatcaatctctgtgaatttgcctagtttacatgtctcatataataaggaattatatacgtgtattatttttttctggattatttctcttagggtaacacttttaagattcatccacgtcgtagcatatattacagcttctttcctatttatggctgagtaatatcccaatatatgtttatacctcaattttaattcattcatctcttaatggacatgtgggtggtttccacatttttgctattgtgaaaaccgctgcaatgaacttacacttggaagtatctgtttgggtttctgtgttcatttctttgggggtacatataggagtataaatatggggtcatgtggtagttctatgtttaagtttttgagaaacagccaaactgttttccagtttgctgtgctattttatattcccatcagcaatatacgagggttccattttctctacattcttgtaaacacttactatttaatattttttaaaacttatagccattctagtaggtgtgaagtgatagctcattgcagttttgattttcatttccctggtggctgatgaagttgagcattttttcatgtatttactgacaattttaatattttttagagaactatttattcaaatcatttgctgtttaaaaaaaatgggttatctttttattattcagttgtaatagttctttatatattttagatacaagtcccttatggggtacatgatttgcaaaatttttctcatattctgtgtcttctcactttcttcatggtgttctttgaagcacaaacatttttaactttgatgaagttcacttatctatttttaattttgttacttatgctcttgatgtcatattgaagaaaccattgcccaatccaagatcattaagttttactcctatatgttcttctaatggtttgataagttttgctattccatttaggtttttgaaacattttgagttaacttttgtatgggctgtgaggtaggggtctaactacactatctcgcatgtggttatccagttgttccagcacaatatgaagaggctaccattctttccccattgaggaatcttggcacccatgtcaaaaaccaatgggctgtaatggtgagggtttatttctggactcttgattctattccattgatctctatgtgcattcttgtgccagaagcacactgttttaatgattgtagtgttttagtaagttttcaaattaggaagtgagtcctccaatttttttttccagattgttttggccattctggggtgacttttaaaaaagatgtagttcaatggttctcaaagcaggagtggttcagctctccttttttggcagtctggagacctttttaggaccttaatctaagtagataaattattcccactttcttttctgagttgctatgttacagtgtatattgacacccatgaaataattgagagaccctggaagtgcttgcctacatagtgagggacaattagttccatgatcatgggcacagaagattttgttttgggaaacaattttgttggtggagttatattcatgcttactcttttatttgtcttcatagcctgcatctccttcagacttcatatctgtttattttcttgtttgtcctctggggtttgggtgttgggtgaccagtcagctggagctggaggaggtgcttagcaaggcagtgaccctggttgggaggagcagggctcagcagggtgaaagtagctgggccttgagtcaggagtggcatctggaaggcctgactgtaagggtcagaagggccagcaggtgggtgtcctaggcacaaacggtggctgctgctgtggactggaggaaggtaagaggccccgagtattccatgttcttactggctccccaactgaggattcctctcctgggctggtgctgtcctgcagcagggaggggttagacagggacggctgcacatcaggccggagtccatgtcatcctcttaggcactgtcactacagattgaggattctgttcataagccaagcctttgcacaaggaagggacccgggctctcaaggaagagcagctcctggtcagacctccatctccttctctctcattgcctgaggcctcaagcttggtctacctggcacaggggtctggatcctcctcccagggttggggtcttactgagctgggcacctgcaggtgggagaagatctggaggggccccatctgccttcaccagattgatgttgagggtccctgagtcctgcaccactatcaggtgctgagcaacttccagtgtcagtgacaaccaccccatggtggaagcagaaccacctcgtgagaaagcacctccaagcctcagtgcttgccatgtgtgggaatttgctggtttcagttgggggcatgttggtgggtggtcatgaattcagggccggattctatgctcacagtgcacatgctggatgtggtacagaccccaggcagggctcagtggggtggttttgggtgtgcacaggtatcttttctggaggagctggtggtgatttggctcccagaagttcctgagctctgcagactcaccaagcactcaatatttgagtgaacattgggcgagagagcagaaggtaagtgtcagggcatcggggttggtgcctctgggaagaggaggaacattctgggaacaaagctctcccccggcttacagggagcttcccatcgctcctgccttgaggatcagggaaactagggcctctgctcttccaggggctgcttgcaggcagtttgctctgggagggggtgacccaggagttgcctctcattttgcatttgagatttaaaaggagaagggacagtatatcttgccaggtcacaaaaattacaggcatcatattgactgaagggcactcctgtcatcactgcaatataccagaatggtcttttaaaaaaataagtgatttaggtttaccagcaactgtaatgcttgttttattcttctagttcaccgttaatgtcacttttgtagttttagcactggcaatgttgattttatgttgactctgatgattttaagctttcatttgttcacatagagatcatcttctttctgaatattaatgcattttttctctatttctactggttattcctgtacatagagtagagaatcacttttcccaaggaggtggaaagcttctgactaccaaaaaaaaaaaaaagtgtcaaaatgctttaaagtcagtaacttaaagatcaaatccaagagtgggcaacagattctgcccagggtctgaaaggtggagaggtgactggtgaggatgtttaaaagacctctcctctctactccctaaatgggggccatccagtgttcttgaggttcagagaaggcccagggctggggcagcagggcactgtcagctcccagctcccaggggccaggagtaagaccccaacactgtccagacactgattgcattcattttgggggagagtagattcttatttaaagaataatacaaaagtctacaaatatgaacataaacagaaattcctttgctacaattttccccttaataagacattccttcctaatgacatatgtgactgcattcatggctgagatgttttctaggatggtgagagcatcagagtggactatctggtgccttggggtcatgcattttcttcttccaatgtctacaggatcccccatgtcccactttgtagtgtaactcagtgtgtgtcattctggtttttgttgtatagatccttggaaagcccatgtcattcctgctgtgaggtacaggcagccaaatggcatcatctctaaacatgccttctcctggtacatcaaattatggaataaatgaaagccattttgacagatattgaagatataagtttctactcttcccacacatgcttctcccaagtgaaggattttactggtgaattgttattagagattagtgtggatcagtgactctgccaggggaaattttgccctctaggggacatttggcaaagtctggaaacattgttggttgtcagagctgggggagggagtcctgctggcattgagtgggtggatggtgctgaacaccctgcagttcacagagccccaccagtttgaccacccaaatgtcaatgctgaggagtggagagccctgctgtgccctcccgcagcttccctgaagcttcccctcacctgctcctcccatgtctccccaccacttccccacttcacccgcctccttacacctcagtcccctccacctgaactcaccccttagtccaaggccagccctgatctccgctctcctggtctccttgctccttagcaggaggcgcccactagatggcgcccttgcccttactggagctcaccgtctccctttccaccctgagacaaatgtggctgcttttactgccacaaccccagccctccacactctagatttgctcagggagcagctcctggacagacctcagggaccccagggaggagcctcactctggagattttgatggcatggtctttgaacttcactgttacccccagtcaggatccaggatgttgggagtgcatgattctgcccggtcccacttcagcaggaccccactgctgagttgtctgtggggacccgggcctctcatctccttcttgcattgcaggagagggatcttagcactgctttcacataaagtcagataatggaggagtgcaggtgagtttgggaaggtggacatgaagagaggttgtgtccctagaggtggcagcagtgagaggatgggcaggtgggaggaacacagcccatccagggttgccagccatattaggagcgacagcctttcctctaagcctccagcctttttcctgaaacattccagaactttccacttcagcacttcccactgaggctcctcaggtctgtccctgagctcccagctgagcctacctacccatctgaaatcctgagtcctgtgtcaccctcgttccccattattctgtgcagttctgtgggacgcccagctctcctgacacccccagtcttcagaatggccatcagcgctgtcgctgtggcaccagggtgactgccgcctggaggctgagtcctggcttcctgacagctgtggggcccgctctaggctcccttgtcctgatcattcatcacctccaggatgcacagcagctgggccagggggaggagcagggacaggtgtcagccaccctgtgtgtctgcaagtcaggctgggggtgtgggaggacgccaggaatgactgaactttctgatttagagggtgagagcttgcactgatggaatttgggatttaataggaaaagcatagcgttttcctattttgtaggcagggtggctggagtttggaatcatagattcccctgggatgtcactgtggacctcagtcccacccgttaggggcacagatttcagaatccacaccctggggcaaagcaggcatgggaggctccatcagcctggccagggctctctatttgtgcagctgctgcaaggagatgtgcactctgatgggaacagtgctccctcctccttggggggcagtatctagctccctgcagcccctctccctgcaggccctgccctctctgaacctcaccttccccaacccgccccccgcaatcccatctcagctgtaatcccaacactttctcatccattatgggtggactgcttgagcccaggggttcaagactatgctggctggacaatatagcgagttgttgtctctacaaaaagacaaaaattagctgtgcatggtggcatacacctgtagtcccagtcactcaggaggctgaggtgggaggattgcttgagctggggaggctgagttggcagtgagttgagattgtgccactgtatacttcagtgtaggtaacagagcgagaccctgtctcaaaaaataaaagtaaaaaaaaaaaaagaaatatggaatacattattgttaactctaatcaaccatgctatgcaatagtccaccagtaataccagtaatagccaataatgaattatctgaaaaagaatacaatttattcttagctatctactgctaaaatttttaagctatcttttatgatagctgaaacaaaagaagtaaatttaaccaaggaagtaaaagacctttataatgaaaactgtaaaacattgatgaaataaattgaaaaagacacacgcacaaatagaagatattccatgttcatgaattggaagaactgatattgctaaaatgtccttaccacccaaagtggtctacagattcaatgcaatttctgtcaaaacaccaatgatattcttcgaagaagtagaagatcctaaaattagaaaccacaaaaattcctaaaacctgcacaaaacaccctgagttgccaaagcaatcttaaacaaatagaacaaagctagtggcattacacttcctgacaatcaaagcatactgcaaagctatagtaaccaaatcagcatggtcctggcataaaaacaagcacatagatcaatgaaacagaataaaaatcccagaaataaacccatgcatctctagctaactgattttcagccaaggagccacatgcacacaatggggaaaggacagcctcttcaataagtggtgctggggaattggatattcatatgcagaagaatgaacctagaccctatccctcaccatgcacaaaaaattaactcaaaatgtattaaataaagacttaaatgtaagaactgaaactatgaaactactagaagaaaatatagggggaaaatccatgacattggtctaggcaaagagtttttggataaaatctcaacagcataagcaacaaaaccaaatataaacaaacgggatttcatcaaactaaaaagcttttatacagcaaagaaaaaaaaggccagcagagcaaagagacaacctacaaatgggaggagaatatatttgtaaatatatacatatatatttgtaaatatatacatctgataagaagataatatccaaaatatataagaaaattatgtttctgtatagttttatctgactgggatacagaggccacatccacagtcccatcctcaaaggccacttgttcccaaaatgtcaagcacatccctcaatgatccatcatcaacacctatgtctgtaggatgaagggtgaatcatgaagcactaaaaaggaagaaggaagccaatcccaaaacaaaatgatgcagggtctggaaagtccaaagcattttttttttttttttactgcatcttcctcctttcttctccacattcccaatcctcactattgattaacaaaacaaaaaaaactgggacccaccatcttccctactgtcaggagatctagcgagattgtttgagtcttagaccaaactttgccataagccaaatttctggctgactttacaatgatatgagctagcacagtctctttttctgccagtcaacttgtgctcggttttatttgcaaccaaatagaggtggtaaccaaatataggtgaccctaaaattagtcatcaggatgaaatcctaaaatgtgcaacaaactgggttgaattcaggattagtagcaacatctctgttgtgggcttgaaaagggggcacccttttatgcagtagcaaaattgctaaattgttgtttgctgagtctttggactctcatcccggattttctatgaccattcaaacagggctgcaatgaacatctatggttgtttagcttggcacacttctacatttctatatagtaatatctagaagtgcatttgctcaatcacaagatatgcacattttataattgactgctatcgaactaccttaaatagccttaatttgttctcaacattgtttaacagggtctgtttaatgtcctacgtccagcaaggacagtatcacttttcttaatatttttcaaattattggaccttaacaaatacttaatgtgcaattaattgattcctttgtattcccatgccttcttttatatgtttccttatagtacacaaaaccacattattgtttctttacttgtgtcattccaccctggaccattcctatctaaactataacattatgagagagagagagagagaaaacaatatgaaaatataaattgattaatcaaaaaaatttaaataggacaaatcaggaagacacaagagagattttaaaattattcagagaataccacaatagctgtaccaatatattttaaaacttagatgaaacggacaactatctcgataaatgtaaattaccaaaactgactcatgaaaaaatggatattatgaatagagcaataatcagtaaagcaattaaaaagacagttgataatttttatttactgacaacaataacaaaatttcaggtcctgatatttttatggtgaattttaacaaattttcaagctcctcctcaaccaattctcagaaggtttaaaactttaacaagaaaacactttctaacacattttcagaagctgttatagcatgataccaaaaccacacaagaaaattatagaccaatctcacttacaaatatacatgcaaaatcaaacaaaatcttagtgaaccaaattcagaattaataatagcaaacaagcaaaatatgttatcatacgtatggcttatatcaggaatgcaagtatgtttcaacatcagaaaatacttctccacattaacagactaaaggagaaaaacgcttgtttaattatctcaataggtttttagagaattttgaaaattttataaagttatgcgtattctgtaaaattgatgaaatccaaccttgatttatttttaaaaattgcctttcctatagaattataggtaaaggaaacacatgcatcctcacagagctacttcaaggctaagttacttcccataagtaacgtatcctgtaatgtgtgcttggcacatattcaatactaaacaaatatttgcaaatcctcaaaccacttctcgctcaaataacccacctttgtcttttgcctttatgttagggttgattttctcaattgtatcttggagatcctttggtgggtctttcagcaattaccctgaatttgcttttctgtttacaattttaattcctgggaactctttcttgttctctgactgcacccttttcatgagagttcagccatcaatcctccagaaccccaccccccccgcccccccaaaaagcaataaagatgtctaaaagcttccttctgggctttcgaatgatgtttaccccaggcatttgttctattcgttcatcacccattttccctacaacttgcctacacttgatatcagatttttatttattagtcacctatcttcttcattggcccattttcctattttgccactggttgttctcaaatgtgttatgattcctggttgtacagtcaagtggttgataatcttggatatacgataaagatttgctctgtagctgtgtgtaagcctatataaaagcttttgtatttttcttcttaaaaaagacaaaagatggttgggaagatccctccagttcaccagttcgaggctgcagtgagctatgatagcgccgctgctctagcctgtctgtctgtgaaaaacaaggggggcggggggcgggggggaagactggagatgtaaatctcccgcagggccctacccgtatccgcaacaggtctctaacaggaacagcctcaggcctgtgttggaacaaggtaggttacagaaatctggaagccagatctgtaacttcagggtaaggactggctctcagggctgatcccccgggctgggtgtcccagaggcacccgcccccgccccttccccaaggcaggccaggacaccttcactcctctccttaggctccccacccccttctcctccccactgtgcctcctggagtagcggtggcggtgccacaggggagcggggcggggcgggctctgagggcaagggggatgggccccgccggggtcactggcggccaccctggaaactcgacgcaggccggcccttctagtgaatcgtcccagccacagctggcctcccagccgcgcttggggcgcctcggggcgcgaatggtgcaggttggggagactcaccacgcaccgtcgggggtcggtccggttattcctcaccgctcggctccagtgggcgcgcgggcctctcctcctcagttcctgcgctgcagtccctccctcacccttcgcagcttgggaatccaactgtgtcattccgacggagcgccgtgaggacctccgagggtgttagcgccaagtgatctctgtccagcgctctgaatatccaagtaaaggagttcaatgaagggcgggtcaacggaggagaaaccgtgactctctcaagggagcccaaggcctccttgtctaattagtgacgcgccaatggatggaggctcttcccaccatctcttcccagcatccagtgacaccaccgccaagggacgggctcggcggaacctgcaggaaagaagcatcggctgagcctgactgcagcgctgtgaagagacaggggaggggatcagtagttggtcccgcgcccaccccctgtttccgcgaggggcggagttgactggccatgcaggcagagggcgaaatgtgaaattccactactcctaccgtttttccctgacccgatggggcggagtgtcgtcaggctaagttccctggcggtaaggtggggagattgaggcgcacacctgccgaacggtaacgcaggattagctaaggcgagctcaggacagaagcctcccgaggagcaggagggcaaaataataaataaataaataaataataaataactcactccttggtctttatttgcggcaggaattcagaaggtgaaagcggggccttaggatctttctgaccttttgggttttaagcaggaggtgtcagaaatgttaccacagggctagctggcttgtggccagcaagcgttcacaatgccctcgatttttcatccctctctgtgggttctttttttcattgtaaggcagaatttctacgattgctcacccactcagagaacctgagctggtttagaccaggtgagacaggctaggtttaccctggtgatgatgtgttgttgccatggcgatcctgcccagtaccagaggccctgcagattcagatgcttggtgcctgtgcttggctgaggggccaatgggtgaagctgccatctgcgggatgatgactgaagcctctaagtcagaatccgcccaggctgagccttagggcagctccatggagcctcggctggcctgggatagagagtccaccactgtgccagcccccagccactgcctaggtcctgtgctgagagccccttgtccagggaaatggcgtccagtggaaaagggaccacccccttgcccttcactcaaggcaggttggtgacaaccctgaagctaatccgttcctagaggagctgcttctgggtccgagttttctctgcagcagagcagctccctggatgggatctgttcaaagtccgcctttcacgcggaattttccgtccttgcaattttccacctccaccactaggggatcctctctgaccgcctcatgccggctctggcctctgagcaggggtttctcttctgcatgtgcgaccttgcgcatgcctagtggccttttgggacctagagctgctccacaccccgatggggttacagagtgcctcgcctccactccaccccaccagggttccttccctggctgggatgggatttcagaagcgccgaggaacagcccagacaggtgtgggagagtagccaaggcccctgtcccggggtggccaggacagcggtggcctcgcataggacctggctgggctgctgcaatcagtgtcctgccccttggagagcaacagtgaaaacaacaagactatcttcacccaccttaagaaagaacagaaccagtatccccaactctgctgtgtatcccaacccaattccattccccaccccactctcagtagccaatatgcaaaatattagaatactcttactgttattattttcaaccacactctgcatcctgaaaaaccatatatttcgttatgtgcttttaaacttcttgaaaatgaaatactgaggctgggcgcagtggctgacacctgtaatcccagcacttcgggaggcggaggcaggcggatcacgaggtcaggagatcgagaccatcctggctaacacagtgaaaccccatctctactaaaaatacaaaaaattagccgggcgtggtggcgggcgcctgtagtcccagctacttgggaggctgaggcaggagaacggcgtgaacccgggaggtggagcttgcactgagccgagatcgcgccactgcactccagcctgggcgacagcgccagactctgtctccaaaaaaaaaaagaaaaaagaaatactgaattttcaaatacttgctttttttttcggtcaaaattatgttctcaaatttcactcctgtagatgtgcgtggctggctgtagtttttgcatttttattattaggtattctcctgttgcattaatatgccacattttatttctctcatgtttttggtgaccacttggggtgttttttggttttgtatttttgctgtatacatgctgccatggtggacatacctctttatacatatttcctgttgtatgcagacacaattttaggatgtgacatcttcagcttttctattgtgtcgtgtgtcttttccttcgtgctttgtgttatttacatattctggacacagattctttgtcaactgtatgtgctgcacatctctttcccagtttgtgtcttcttcttcttttttttttcttaaaaaaaactttctttatagtgttttttttttctttctttctttgttttgttttgtttttttgagatggagtcttgctctgtcacctaggctgaagtgcactggccgatctcggctcactgcaacctccgtctcctgggttcaagtgattctcctgcctcagcttcccaagtagctgggattacaggtgcctgtcaccacacccagctaatttttgtatttttagtacagatggggtttcaccatgtttgtcaggctggtctcgaactcctgacctcaggtgatccaccctctttggcctcccaaagtgttgggattacaggcgtgagccacagcacctggcctgtgttctttcttaagtagatgttacttttaatataatagaatgtatcatattttgcttttatattagtactttttctatctaattcaaacacatccccaagggtctttgtgtgtagactgaccaatttctcaagaatcatgaatgaatactgcttctctttccccaatttatctgtaatgctacctttattataaagtttctatgcatgtgtagaaatagttcctgatttttcactctgtgccaccagcataccaatagcacgctgtcttaaatattaaatagcagagctttatgagacaacttgatgtgcagtaggcaattgcccccttgttactcttcttcagggttctttgttgtaccacatgaattttagaattggcttgtccagctaaaagacaactgcaaggattttatttggaagttcataattctatacataatttggggaaagtattttcataataccaagtcttcctattaatgaacacagactctctctctctctcccccacccccacctgtttagttatttatatctttatggtctgttagttattgtttattgtctttcaaccaggtttcatgtttttctacatagaggccttgcatgtgaaagtctttcttcctagcttgctattacaaattttttttaattgcactttttgggtacagtggcttgtactgtaatccccgatacctgggaggctgaggcagatggattgcttgagtccagaagttcaagaccagcctgggcaacataatgaggtccctgtctcaaaaagtttgttttaaaaattgcatttgctgttattcaacaaatgtcattgtgtctcatatatggatttttatatctgataaccttgttcaacaatcttttgattctaacaatatatcagattcttttgagttttccatatagacaataatgtcatctgtaaattataattgtttcttctttgttatttcttggaccttttattttatatttttgtcttgctgcaaggcaatatccctctatatattgtggggtcttttttctcataaagtggggatggtgaacacccttgtcttgctctctgattgtataaagcatgctttctgtagcattttgtagacgctcttttttagattgaggtaattcacttttatttctggtttactgagtttttagcataaattcaggctgaatttgagctaaagctttttctggagacatcatttgaaaaattcatatgatttactttctttaagtcaccaaagttatgatttacattgaactgagtttctactgtttaactgtattcttgggagaaaacccacttgtcactgaacaatatctgttttatttactgctgtcttgtgtctaaattttcttttaggattttttgtatatgctcagattagcctgttattctcctttctgtatttttttctggtttgggggtcaaagttataatagcctcacaataagagctaagaaaccagccctaatggaggccggggcaggaggtttggagttcaagaccagtctgggcaaaatagtgagacccccatctctatgaaaaatagaaattagccaggcatggcagtgagtacctgtagtcctaggtacttgggagggtgaggcaggaggattgcttgagcctaggaatttgaggctgcagcgaactatgattgtgccactgtactccagcctggatgacagagcgagaccctgtctcaaaagaaaaaaaaagaagaaataaaaaggaaaagataaaagagctaagcatctgtttccttttttccattttctgggagagtatgtgtaagactgtaattaactgtttcttgaataatgggagaactctgtaaaataatctggctttggtgttacctgtattggaaggatgaaaaataccaattcagtttcattattggttgatagggctactcatgctttttgttttgttttgttttgttttgtttttgagaggaagtctctctgtattgccctgttgtccaggctgagatgcaacgttgttcacaggcctgatcctggctcactacagcttctaacttccgatctcaatagatcctcccgcctcagccttcccagtagctaggactacaagcatgcagcatcacatccagcctcttttcctgcctgacccagttctggtttcctttagttttctaggtgttcatccattttatctaatgtttaatgcatttggcataagggtgctcagtgtcctttcattgtctgttgtctgtaactgttgccattttcattcctatttatgagtactggcgtcttctctcactttttcttaataatcctgctggaactttgctttttaaagaacatcttttgacttgttgattcttttttcatacatattaactattttcttattttttgcctttatatttatttcttttcctgtttgaaacattgctcttttcttactataaaaatgggtaagtagctcatgaattaccacctcttttaaaaatcttttctactgtaagcattttagcagtttacatttgcccacaagtaccacttcagctacaccctatgtgcttttacataaagtcttcatttttggtaagacatattctcaaattttaattatcacttgtttttaaatccatgatgttttatttgaaatgttgtttctaaagatacattttctggttatacttttattcttctaatttagcacagtggccacaaaacatggtctgtgcagtgcatacaatcgatgagtaatttctgagctgtagtatttggcataatatatggcaaaatttcctaagttttccatgtgtgctttaaaaaacttccagtaaaatacataaatctgttagatcaagcttctcacattgttcaaatagtctatatgtttactgattcatttgactgcttgatttatcaattacaggtaggaatgtattcaaatctcctattaaagtgtgacactcaagtggctttttaaagacagagatgccaaaccaatgaatacatgattttccccaaagcctgcacaaattctctaatgaaattttaccatgaaagtttgtttaattaaggcttactaaagcagtatgttgtcttttactttttaaacagagaatatatattttaatacatcgtttaagtttatgattaattatctattactgaggataagaatctttgcctgtgctcattcagcatttgcacttcatttatgatctgccttctcatagcttctgttaatttttatactagagacatttatttgtttgtataaatgttgaaggtttttttttgttgttgttgtttttgagtcagagcctcgctctgtcacccaggctggagtgcagtggcatgatctcggctcactgcagcctccatctcctgggttaaagtgattctcctgcctcagcctccagagtagctgggactacaggcatgtgccaccaagcaaggctaatattttgtatttttagtagagatggggtttcgtcctgttagccagggtggtctcgatctcctgacctcatgatctacctgcctcggcctcccaaagtgctaggattacaggtgtgagccaccgtgcccagctgggttttttatattataaggagatgtaatagatagatagatgtttcaaagatagtcaaatgtttttaaaatttaaaacacttttttacaggttgactttcaccatttaatttcatctatgtgttttgccttagagaaattttaaatgctatgtagatctcatgacttataattatgaagcattttgttttctgttttccacgaaacttagcttaactttgagcatataatagttgtaaaggtaggagagtaacactgaaaaaaggaattgcataaaaatggcacattttctgtagagttgtttatcgcctgaaaataggccccatttcatggaagtaagatgatcaggctcaggtccccagacgaaactcttggcatggtttttggagatagtccagggctcagtactggctctatcatttgctacttctcccaaagtaaccaatatctcatccaccctgagcccatttccatatctctaacatgaggataatagcatctaccttacacaccaagtagagggatcaaatgtaggaactaaatcaaagtaccagcactgaataacctacatcctcccacttcccaaaaggaagagagatgtatcccctgttgacaaacgagaccattttgcaggagagaaaggaaatgccagttcacttgcaatgtaaacatgctctctctttttagggatgtccagggacctgagagagaacccatgcttaccaaagagtttctagttccagacacacaggactcgaagggtgacaagtatggttttcagggtccctgaatccacccagtcctcacagaaactcctaaaagctgtcgattgacagcgttgagttcacagctctggtcctcacatgctgatactgcttgtgatatcgaacccgacaggaccccacatcacaattgatttaccaactacaatataatacctcctgaatctccaaattggctcacccaggaacaaaggcttggggtaaaactggattaggagatataagctctgaattttctgagggtgagacacacaaggattctaagtgacacgccacagagtaacgggtctgtgactggaggacccacagatttgtcttactggagacaccacatgcacacaaactccatccttagctgtggaaacaagggtcttttgctatcttagccgaattctgggagtaatttttggaggggaggagatctttgggattgcctctttcaggccctttacaaaaatacctacttcttaaatggtaaagcttacactaaactgaaaaaattacatccttggctttttatgaagtaggtgttggattgaatcactactggaagaagtatggcatcgcaaattctaagcagtggtcaaaggatggatctgttaaattagaaaaatctctaaatttataaaaagattttagattcctttattctaaacaattgacctatttgtactcatgggacaatcaaatttcaaaggagatatgtaacgatttcatggcttgcattaaaaatccttctgataaaattaaagataaaaaatctgaccccctgccaaaaaaatcttttgaagttcatactgcctgctttcaatattctgtgggattcacaatgaaaggtgccttatattgtggcctagcttcaagtttatgccttcgccaccatggcctgggttcaattcccagtcagggccccagcgcctttggtttaatgtttgcgtggcatttgacttttttacctatttagtattggtgagattacctttggtaaaaaaaagtttaaagagtggaaatcgcaattctttgtgttggctaaaatctgattataagagatctggaaggttttatttttctttttcaaagagctctatggtcagaagtcggcttcatgaaaagctaatatttaattatatgtacatacagtctttctggattttctcttttgcctcctgttttgaaaaatatttggatttgagtgaaactccgttttagaaattaattgcttggtacaatatacccatgtaactaccctgcacatgtaccccctgaatctataataagagttgaaattttgacaaaataaaattagattttgaattaaaacaaataggtgcttggttcctctgctcacttctttttaaaaggaattcctctcccatgtacttcttcttttcccttctttaccttccttttggcatctttggtatcacatgaagggatctagagggaattttaagtgactctgaaattccttgagaaatacacaaaaagatcccactcaccccttttgggggtctcctgttctccttgtggagtccagagtcagggacaggctcctccaggtctgcagctctgctctcttttatttcatcttggctgattgctttggttttgtgagtaccaggcattactttgtactgtgagagacacgtcctttgtgagtgcaacggctgctgggtcactggtgagggctgcagtttggagatggctgagagccgttgcaataaatggttgtgattgcagggggctccttgtttctttgcaagtttagatgagaaaggtgcagtttggacacagtttaaaggctgtgaaaacaccaccaatgaatatgatttcctttggggatggtctgattaaaagtgggctgattgttgctgtgctactagccttgaagacatgtttctacagcattgtgcagtgtggaaaaattgtgtggcttggtcttgtggcatgtcccttcttttagagacctcagattcaatgtgaaattcgggatttttgattttcaaagatctagatgccctgccttccagatgtgcctactcttcacatattttaaaattagatcctataaactgcaaatactttgttggcttctgtgagatcagaggtccagttagaaaaggaagacagtttgttaaaattaaaaactatttatctaatctaactagattggcctccaaatatgactttctgacattcagctggttactctgaaaagatttctaaatctcttgaggctcatctatatgtttccttgcaaagaaaaaaaaaaaaaaaaaaaagcaagcccaagcactagtaagaaaaagatttgcaatgtttcatgaaaggagtagatgagtgaagcatttatttgtagatactgggttggatacctgtgcaaagaagaagaggtcaataataaaaattgccaggggatttcttggaacttaacaagctgaattaaatatagaaatgtcaggaaatcaaggcaggaaatactcacttgtggttaggcagacagggcagggttctgagcttgagatggagcaaacagttgtggtgggtgaagttcacatgctttagagctcagctgtcctagtaaagaagcctaagagtctctaaagctcttatgagaagatggattttttttgcctagattaaaaggttaaagaattgctttaagttggataaaataaagctaaatgtttaagcaagttgtgaaaggtttatgaaaaaattaattaaaatatttttgtgtgtaaacatattgactaaagttgaaggggtataattcagcatttctgtaaattgagcattgaaataaaaacacaatgggtttctcttagagcactaacctgctctttaacaaaaattgtaaagggttatagaaagtctataaaaatgttaccttatggtcaaacattaaaattgggtaaatatgtctatcaggttttattaagaattaggtttaacattaatagtacactaatgtaaaggtgaaatttggcttatttggtacaaaaatcatacaggaagcattgtgaaatataaaatgatttttagctttctttgggctatatttctataaatatgttattgatgagggttccaaagttatgggagactcctataattctgctatatctcagtgtacattatcagtcataattataattgtcatgttaaattattgtgggccacagaggtaacagatttccttgtcaattgtgtctttgactatgactaccctaaaacgttcagtcacccatatacacatgttaccttgttttggccctctttagaaggtaattttataatcagctataaagccctaacaggtgctcttaaatgcaaattttgataactttggagattgtgacatcagaagagaggaaaaatgttcgggacacttggagagctaaaatgttcattgatatcaagcaggacaggaattaactgcatgaagtgaactaataggaggctgaagtgatctttttgactttttgcttaaaacgttgctgatcctttgttttgcttttcagagtcaaggcaaattttcttttgagctattgacagcttttaacgattaatcaaaatatactcctatgaacaccatttggagcattatttgtttctctctacccgatttccccagaatttggaaactatttgtgggtattcttaatttatggcaatatagttatttgcataagtgcaataagaatgtgttttctttggtaacaggacacaatttgaaaaactggttattttaccaaggttttgaccagaatgctgtgctttcctttaaggaatcaaacttgacttgtggagctaataaagcctttggaaaactgaccttatatcctgtgaacacagtccctgtacagggttactgatctgtgggaagaaaagaatgtcacattctgacaggtcaggaatcccaagttatcttgaaacttcaagaggacaggaattcacccaaccatatgtatttgatggtagaaatccatggcaggggctcagctttaaaaagtcttatctcagattccttctataaaacaaagtcccattaaaaccaattttaaaagcctatgtgaaaaataattattcttgctgcacctcgtacaaataaagtggcaaagcataataaagcaaattggtcctgtcgtaatttgtctttagtaaaaacgggaaactggggtcgggtgcagtggctcactcctgtaatcccagcactttgggaggctgaggtgggcagatcatctgaggtcaggagttcaagaccagcctggccaacatggtgaaaccccatctctacaaaaatacaaaaatgagccgggcatgatggcgggtgcctgtaatcccagctactcaaggggctgaggcagggaagcggaggttacagtgagtcaagatcgtgccacttcacgacagcctgggtgacagagcaagactccatctcaacaacaacaacaaaaaagggtaactggagagagggaagttatgtttcaaaaacttttggaaactatagtacacctgtttttaaattctagtctggcattcagtttttattattttctacagtttgggttaaattcgtatttctctggctacaagtctcctaaataatcttttcatttgtttcctttttctttccctttttccccatttttcttaattggaaatcactgaaacctaagctgtgctttcttaaagccctgtgaactgaagactagacaaccgaaacttctgaaggaagtagcagcaacctatttatatgtgttgctgttgcctactattatgttttagcaggtgctgcctctacacccccgaaacagagagtgctactgggaacaaatcgactttttccactccagtgctgcattcggtgccccataacgatgaccccctctcagcaggaagtagccagaaagattacaatgctccatctccctatgattcttgtgataaataaatatacaagcatgatagaaatcatgcgcaaattgacagtggggattgtggcaggccagatttcactaatggaggtccccatcacaactacttcagtactgactgagtggttaagttcagtatcaaaagctgaaagtgccagcgcctttctacaaaggctagaatgtaacaaaagcccaccaagggttttacctaggcctttcctgggccttacagcatgacaaaacaaagaaggaattcttaaccagacctgtttaggattaaacaaatttaattgggggtctgaagaaactcgccaggcctccacaaacaagttcattgggggtctaaaggaaccccccccaaacctctgtgattgagcaggagacaaggtcagggtaattgccccagcacctggactcatttagatttaagtaaatgtactgaggctccagagaaaggtctccaagacttagactagagttacagattaaaagaagttaatcacttatatctttagataaatgcacactgacacgtagacatacatcttagaaaatatataagctctggaaaaccttgtaatttacagttggtctggagatattttctgggccttctctctgtaaccggttccagaaataaaaaactctcttcctccccagtttatctgcatctcgttattgggccgtgagaaatagcagccagaccctgagtttggtctgggaacacactggctgggcttcctgcctggcggtagagcttcactgtcctccttcccagccaaaatgtggcccttgaaggcttcctccccaactgaccggttttgggttctaggtactcagggaacaccgtcttcaaggaggccattttcatactgttcctggtttgatttttctgaaattaggaaatgccccttgaggcatccaggattgtctttatttcccctgaagcttcccctcctgaagaaaaaagttctcaaacaccctcaggactcaaaccccaagttcaccctgtgaaacattcccatttcctaaacccaggcaggctcatggccctcagcctctcagaccccatggaaacctcctcccccacttcacgggttctctccatattgagagcctcccctcctcggcacacaacccagagactcaccccaacatgtgtagcaaatcaccctggaaacaatcatggctgaacgtggtagcccatgcctgtaatcccagcactttgggaggcccaggaggtggatcacctgaggtcgggagttcgagaccagcgaggccaacatggtgaaacctcgactctactaaaaatacaaagttcactgggcattgtggtgtgtacctgtaatctcaactactcaggaggctgaggcaggagaatcacttaaacctgggagacagagattgcagagagccaagatcgcaccattacactccagcctgggcaagaagagtgaaactacatctaaaaaaaaaaaaaaaaaaaggaaaaggaaaagaaaaaaaaaatcatgaggcaacattgcatttaacaatattttatttatcaaaagacacttgtctttctcaggtaagtgaaggtctagagatgaaacgagtcccgatgtaaattgccccatgggcattgctgagatcacaagatcatcactgcagcatgcagcacaatagtaaatttctcaggatggaagttcaacaatccaaaaggtagtattttttttcatgatgctcagtccatcatacgaaataaaaataaattccttttcatgatcatccattcagtagaaaaaatgatagtaaatttgttctcatgaagatttttaccgtaacatataggatttatcgttattattattattctttgttttttgtttttttgaagcggagtctcactctgttacccagtctggagtgcagtcgtgcgatctgggcacactattaacctccacctccagggttcaagcatttctcctgcctcagcttcccgagtagctgggattacaggcatgcgccaccacacccggctaattttcgtatttttactagagatggggtttcaccgcattggtcgagctggatttgagctccggacctcgggtcatccgcccatctcagcctcccaaagtgctgggattacaggcgtgagccaccgcgcccggcctcaatttatcattattcacgcatccacaaactgggttcttatattttgtacgtgattttttccattgaggagagatatctgtgcatattcatgctgctcatatttcatccacaaactcggttcatatttcatccacaaacataattttttccgttgagaagagatacttgtacatatttatgctgttcaaattcacatttcatcattcttttacaagaaatagataatgtattttaaggttttccagtggtattacagatattttactgggtgtatagatagaaattaaaccaaacttctttgttctggccgccagtcatgcatcctgttttcaacatagttcacatacaactggttgtgtaaaaatgaaattattttgtttagtacaatcatcaacagttggttgattagatttttaattatcaagttaatcattgtcattatgcttctcatcgcactcgtcattaattgctgtgggaggaaatttgttatgttccctatgagagggtgtatcacaaattcaaataagaattcaacgacaatggactgtataaaggaaataagcaagtccatggaaaacatatttttttccggaaaggattaaaatatttttaaaaaggaattaaaaaaaaattgggcacggtggcaaatgcctagagtcccagctgctcaggagatggagacagaaggattgcttgagcccaggaataagttggaggctgtagtgaacagtgattccaccactgtactccagccagggcaatagagggaaaccctctttctaaaaagacaaaaagaaacaaaacaaaacaaaaaaacaccacatcaaaaaacccaacaacaaaatgaaaaaccaaataacagcaatacaattggagctattcgatccaaagaagtaaatgaaacataaagcaaataaaagagaaaagctaatacctgtgtcctgcaggactcagtccaagttctgctctgactccctcctggtgagccaccccttaaaaagtcacttggggcggggttactttgacagacagtcttctgtcaaagagggaggcggtaaatagcacttttttttttttaatttaacgcctttccaacaaattagcggctatgttgtctaagagtgcaaatgtcagaggtgggtacaggcagcaagaccctccccacaggggcagcagaaggaggaatgactaagggaacaagactttagtgtgctcaactacacaggacaggaaacagatgctttttacaaaagctggtggacttgaaggcagaatattttcaagttcctgtaactgcgaactatgacctgtagcctgtgagagtgactttctgtggcaaaggagcttttgtgaatgtgaggaagttaattatcttaacagtgggaggttctcccggcttatctagctagaccctcgtgaaatcccaagtgtccttaggaaggggaagcagagagagatttgagtccagaagaggaagaaggtgatgtgaggcccagtaggggaacaaagggcgatggcatgtaaacacttagcccccagaagtgggagagggctggggttcatcacaccagaatccctaacaatcagccttattttaattacccttgaaatggaaggaggccttagagagccagaggcttggaggggcaccctctgctgcatacacagatcccaactgctgtgggctccaaataattgcaccagggaaatcacaaattatcaaaaataaaggatgtaaagcttttaaaaaatattaaaagcccaacaaataaaaaaagttctaaatctataaaattgacctcagtctgtatatttagatgagtcatgtgtatatagcgtttcacttcaaaatatatgataaatctctcattcattggcttaaaaataaacacttcaatcaagtctttatcagaaaaattgaaacgttaactcaattgccttttagttcatgtgactttacaaaacttaaaacaataaagtcagttttaaaaattattagtaaagtaaaagaaaaatatcttcacaatgtagacattttgtccacatgagacatgtgaaatattgccattactaaatatttgcaggtcaaaaactgtttccaaaacattttaaataatcatctggcctgtctgttttagagcattcaattctagctgaggtctggggacatgtgaaaggagccacggcccgactccgtgctgggaagagtcagacattttccacagctctgtcctttgctgtgggctctgcaactcctaccaattaaaattgcttacgtttttgttttatttttactaaagaggggttcctaaaagctaacattatactgagtatatgtaactaaaactactaagaaaacaatttcacaattatacaaatgtgccaagtaaatgaaaaaataaactgtattttaataaaggttataaaaagaaaaacatatagtggtgtgaggactgtctcaggtcttcactgagcaagggatcatgacattctatggcggacagctgaccttggctttctgctcctcttgattatgtctactaagtgacatacttactctttttccacctgtcttgcctctaagggtaacaggttttatgagatccctcctagtgctttgcaggtcagcctccctttgctgcattccaattttactgcctataccctccagctggcttttgatgacaaaagtcctggtcccagccattctcagattctgtcatccccgtgggcactatggagctcagcactatgggaggttccccaaaaatctcgttttctatgaggaatggccaccacctgcatctcagtgatgctagtgacccctttcctactcctgtgctcactggtcctcatgaagatcctggttggtctgtagccccctatttttcctattaaagagaaattacagtaagacccatttgtgtgcaaaatcaattttaggcttattacacttggcctgataatttgcataaaatgcagcaagaattcatcggccatataggctacttttgagttaattttcctgggtttttacctaaaaatatactattttggttagagtcttgtgaaaataaccaatgtgttcaattgttttattttaaaaggctcttactgaacactataaatatgtataagttgaatatacaaactatattgtcataaaatcacaacccaaaatgtggagaacgcagagggaaaggtaaatttgctcgcaaaaacatacttcacccaaataactggaaaaaaaaaaagactttcatgacccttctttaaccagagcagcagctttcaaacaaggtgtttgccttggaaatgccattcacaagccaaacggcccttgagagctgtctgtcaggcactgtagaatctagcagctcctcacagagttagaaatagtttcaggaaagagattccctgcttttagtaactgcactttatattcccagatagcgagattgtatgtaaaccatttttatcttattctggaactcttttgggtactttttttttttttttttaaatgatggagtctggctctgttgctcaggctggggtgtagtggtgcgatttcagggtatgagaaaatgcagctggacctggctctttccaggaagaccctcacagccaaggagtccaaagcctggggttttcatctaattccagtgtgactggggtaggagcagctttggtgctgggtgtgtgtgtgtgtgtgtgtgtgtgtgtgtgtgtctatgcctgtgtctgtttagggtgttaggctcgtggttgtctagatacaaatgtcccagggctcaggagccccagggttatgtcaggggcaccagatgaaggtgtcaacagaagttagggcacaagggacaaaggtgagagcaaggttagattcatttaggtgcaagaaatcatagagggaggagggagaggaagccctcctgctaccaccgaggaagaagcgcagcttaaggcagaaagcctgtccggagaggaagtgagtttgagggcagggctctctgggtaaagtacggtctgggacaccagcctgggggaagggtacagaatgcagagtggcctggcgtggggactaagaacagaggagagcagctttcactgggagggtcagtgttttcagtgtccagcactgagcaaggtgagatttgggcagcttgctgtgaaataaggtcaggctctggcattgtccccattgcgtgtgtgtgtgaggggcactttgggagagtgaactctccacctccatcctctcatacgtccttcaaccgagcttgccagttaccctgattccaaggagatctatttattgttgacaatactggatcctagcagaggctgggtaggagcctgggcacaagcaagtggaggagggggcctgggcctgaaagacctgggaggtttgagagaggacacagcccacagaatggagcagatggggtagagtcggcaagcattcagggctcctagtaagttggacaatggagaccctgaaagatccagtaaaacggggagaacaaacaggtccccaactcacatccttgcagtgcctggagcttcagactccagacaggtggggaaggaaaattgagggatgtgaacatgttggagaatgtcgtgccctgaagaatgaagaaaaggggggtgaggaatgagagcaggaacggcttccagtgcctggtgcccaggagaactcagaaaatgggtgtggtggagaggaatcgaggaaccggaagtggtggaagtgtgcagggcccctccgagatcactgtgactgccaggcgtcctccctggctggagagcttcactgtcctccttcccagccaaaatgtgtcccttgaaagcttcctccccaatggactggttctgggtcctatatatttgaaggggtggcctgcctctccacacctgtgggtatttctagttgggtgggaggagagacagagaaaagaaataagacacagagacaaagtataaagaaacaacagtgggtccaggggaccagcactcagcacaccaagggcctgcaccggcaccggcctctgagtttcctcagtttttattgattattattttcattatttcagcaaaaaggaatgtagtaggagagcagggtgataataaggagaaggtcaatgaaaaacatgtgagcaaaagaatctatatcataattaagttcaagggaaagtactatgcctggacgtgcactcaggccagatttatgtttctctccacccaaacatctcagtggagtaaagaataacaaggcagtattactgcaaacatgtctcacctcccgccacagggcagcttttctcctatctcagagttgaacaaatgtacaattgggttttacaccgagacattcagttctgaggggcaagcaggagacagtggccttcctccatctcgactgcaagaggctttcctcttttactaatccacctcagcacagaccctttatgggtgttgggctgggggacagtcaggtccttctcatcccatgaggccatatttcagactatcacatggggagaaaccttggacaataccccgctttcaagggcagaggtccctgcggctttccacagtgtattgtgcccctggtttattgagactagagaatggcaatgacctttaccaagtatactgcttgtaaatattttgttaacaaggcacatcctgcacagccctaggtcccttaaaccttgatttcatacaacacatgtttttgtgagctccaagttgggtcaaagtggctgggtcaaagtggctggggcaaagctacaaattaacaacatctcagcaaagccattgttcaaagtacaggtctttttcaaaatggagtctcttatgtctttcctttctacatggacacagtgacagtctgatctctctttcctttccctacatatattcatggaccacagtcttcaaggagtccatttcctcactgtttttggtttgatttctctgaaattaggaaatgccccattgaggcacccaggattgtctttacttcccccagagcttccactcctgaggcaggagcttctcaaacaccccccaagactcaacacctaatttcaccctctgaaaccttcccatttcttaaatccaggcagggtcatggtccttagcccctcagatgctgtggagaccttctttccctttcatacattctctcaagattaaaagccacccctcctcagcacacaccccagagactcaccccaacatgcattgcaaatcaccctggaaacagtcataagaccacactcatttaataatattttatttatcaaaagacactctttctcaggtaagtgaagttctggagaggaaaagaggagtcctgatgtaaattgccctgcaggccttgctgagatcacaaggagattgttactgcagcttgtagcacaatagtaaatttcttctctggatggaagttcaacaatccagatcgtagtatattccttttcattatgctcagtccagcaaatgtgatgataacaaattccttttcatgatcatccattcagcagagaaaatgtttgtaaatgtgttttcatgaagatgtttaccataacatacaggatttaccattatcaatgcatccacaaactctgctgttgttttttatacataattttttccatcgagaagtgatagttgtacatattcatgctgttcatatttcaaccacaaactctgctggtttttttatacgtaattttttccattgagaagtgatacttgtacatatttgtgctgttcatatttcatgtttcatcatccttttacaataaataggttatattgtattttaagtttttctaactgtagtgcagaaattgtactgggtgtatacatagatatcaaaccaaatttacttgttctggctgataatgcatcatttatttcatagattatgtatttctttgacacatttcacgtacaactaattgcataaaaatgaattttcttttagtatagacatcagcatgtgcttaattcggaatttaattgttgagttaaacatcgtcattgccttttccgttgttattaattgctctggtgggaattttgttatctcatacataagacagtgtgccacaatatctcttaaaatttcaatggcaataaactttatatttaaaaacagggaatctatggaaaacacatttttttctaaaggattaaaatatttttttaaaataattttctaaaaagttaggcacggtagcaaacgtctagagtcccagctactcaggaggctgagacaggaggattgcttaagcctacgagttgggggctgcagtgaactgtgattgcaccactacattccagccagggcaatagaagttaaccctttttctaaaaaaaaaaaaaaaagaaagaaagaaagaaaaaaagcaacaacaccaaaacctcaccaacaaaatggtaaagaaaaaaaaaacagcaatacaatgtaagctatttgatccaaagaagtcaatgaaatttaaaacaaatgaaagggaaaaagtaatacttgagtcctgcaggactcagtccaagttctgctgtgcctccctcacggtgagccacccctttagaagtcacttgggtcataagttaacccgataggaagtgtcctggccaatgaactagggaggtggtaaatggcaccattttaaatttaaattcacggccttttcaacggatcagtagccatgttgggtaagagtgcaaatgtcagaggtgaaaagaggcagcaggaccctcccctagtgcttgggcaacagaaggtggaatcactaaggggacaagactttagcatgctcaagtacacaggacagaaaacatgctttttacaaaagctggtaaatatgaagagggaacattttcaagttcctgtaaccaagaactaccgcctgtaaccggtgaaagtgactttctatggcaaaagcgtttttgaaaaggtgaggaagttaaatatcttaatgttgggaggttcttctggtttatctggctagaccctaatggaatcccaagtgtccttatggagcggggagcagagagagagatttgagtccagacgaggaagaaggtgatgtgagtctgggtgcgggacagggggagaatgatgctatgtggggatctgggctggggaatgacttagctgcatgagcggagtgacttagactcctgaactagaagaaatctagggctcatcacctcagcagccctaaccatcaaccttatttttattacaggtcttccatcgacggactccctaaaaagccagcggcgtggaggggcgccctctattggacaaatagatcttgactactttcggccctcaaatagcctgactaggcaaataacaaataataataatttttttttaaatcatggaaaatattttaaaaaacaattaaaaagttataaatctataaaatctgcttctgtctgtgtgtctgtatatttagatgtctcatgtgtacataatgtttcactaccaaaatatatgatgaaaccctcattaatcggcttagaaaactaaacacctaaatattttctcagaaaatacaaaaactttaactcaaatcccttttaattcacctgactttaaaaatctttaaaaaataaagcatgctttaaaattattagtaaagtaaaattagaacatcttcagaatttagacatttggtttaaattatacaggtcaaatactgcccttagtaaatattttcaggtcataaacaactcctgtaatcttttaaataattgaattacatgtctgttttagagctttaagttctagctaaagcctggggacaaatgaagggcaccatgccccctctctgtgctggaaagagacattttctacagctctgacccttgcagtaggctttgcaactgctacctatcaaaattgcctacatcctaagtttattattaaaaggagttgcttggagttaacattataatgaatatatgtaactaaaactatttctcatacaaagtatatgaaaaagtagaatgtatttttaataaaaagttataaaaagacatgaacatgtagtttttataaaaaacagtaattttgtctagttttgcagttctaaaaagttatgttaaattcaaaaataaaaaataacaagacaagactcaaggtttaaataagttgtaaaagatttgtaaaaattagttctataaaaattttacaaaaaaaagcattggttaaaatttaaggaattattttgtttttacagaaattaaacattcattaaaaacactctgatacaaggccttaatttgggttcatgtatcagaatagcagggttttcttagaatattaatctattctttaaaagaactatgaatgttatgcaaactttataaaaatcttaccttagagtcaaactgattaaaattccatagattttacgtaaaattttattaaaaattaacttcaacaaaaataaaatttgattttctcctttaaacaaaagttttgcgtaatattaaataataaagcatttttgtttaccttttaaactataaacacacacacacatacacatacaccaacactaaagtcagctgacctcatactgtctttattggatattcttgtttaaaaaactatcttctttggaaaataaagttttttattttaaaccatattttaaattatcattttgactaaatccataacatacagtgatctgtaataattctattttataatatcaagtgttttgaagaactccaggaacagccatgagagaacactgtggtttagtaacactttatttcctcagtttgaaaatagttgtctttcttggggaggccggtttcagcagatgaaaacaagagtcatgatgaaaattacccagcagtggttagtgtgaccataggaacattgtcatcaggtcagcagaaaacatatcagcaaatttttctcatactggcagtgtgtaggggtggatgtttacagttcctgaagccccagtggtcgtgtggtcttttagttttgccatttataggcaacttgtggtaactagctcaattagacacattccttatcacaaggacagagggctttctgtatcctagggttcttgccttggcattccagaagaatcaggtcacacgtggacgtggagaatgagtgcaaggttttattgagtggaagtagctctcagcagatgggggagccagaaaggagattggtttctccctggattggggccgttcagcagccctggctctcctctgactgccccaggcaaaatccacatcgttctataagtcggtgccctgctggtgtgctggtgcctgttgtcatgttcctcttcatgtccagccgcctgtgtgttcctccgctgatgtgctcctctcgacgtcaagcctcctgtgtgtctgactgctagggtcttggggtttttataagcacaggatgggtcttagcaggccaggatgatcttgggaaagacaacattcggtcaggaaaacaaaaatgcctgttgtcatctaggtccgtggggacaagcccaggtgtggagcttttagccagggaccacagcctcctgtatccaacacttcccttcaccttttctatatcattcaaagggatcatgcccttcccatcccagcacttcactttcatgtcatttgccccctctgaagaggtacatctaactgccattagaatatggatgatgaccagtcttagctgcttcctgctgaaagggggcattgttttgggggaaaacggcagtcagattcctcccaggggtctctataataaaagatcgaggtggctactttcaggaggtcctctaatgtactatctggtcccaagtcccatttctgcaacctcctcctgatgtcaggagctgcctgagtaataattttatcctttaggattatctgtccctcgattgaattaggagatagagaggtgtgatttaccaaggcctctcttagcctctccaggaaggcagtgggattttcatcaaatccctggttaattatggacaacttagtataattgagaggcttggtcttagacctacgtaagccctctattatgcacacctgaaagtgtctcctcttccagtcttccatctcattattgggatcccatttagggtccttcactggtgctacttctcttccagttggataatattcgctcccttccctgatgctataggtgatgcaaagctcatccccaaatctctctgctgctggcagagcagcctgcttctcagtgtctatcaggttctgactcaaaagtaacataacgtctctccaggagagttcaaatgttagggtgaaattctggaaagcttctatatatctatcagggtcatctgaacacttgcccagatctcccttaatttgctttaagtcttgtagggaaaagaggacttggaccttactgggcccaaattcactgggcatctgtaggaggggcaagagtgagactgggcttgtttgggatgaagatttctaggaggggccaggtgagaggctgaagctggatacggaggttggggtggacccagaggagcagggcttgagggagctggcacgtcagctgggggtgcgtctgggactcgtgtctttaattccctgggcttgaccctggcagccttccccgagacagcaaacaggagggctggaacaatcctacatgtcagcaaaggtctggattgctttgcaaggtatagaaagcctgcacatttggggcctcagaccatgtgtcctcacatccagagaaaagttctaattgcaggatggtattgaaatgaatggtcccttcctgaagccaagccagtccttcctgtaaaccataatttggccaaacctatgtgcggagggctatgagatgcttttcctctggattctgagggtcaaaacagtcccaatggttcaggatacactcaaggggagtacaagctgggggtggtgaggagaactggctgcccattctgaaagacagggaatagaggtgttcctcatttcccttccttcttttggcaaaaagctcagggtgtgatggggagggaaagcaagcatcttcacttcactttccacctcttacccctgcgccctggcaaccttggcaggtgccggccacaggtacaaatgcggtatgtacccatgaagcagggagaacctggagattaggaattaactgccctcacctatgtttccttttctccctgctgttgaaaaactttgagttccctgggcctttttatcccatgaggcatggcctccttctgtgggatggggttcagtcagcaggaattggtcctgtccatttacattgtgcctgttgcctggctttgaattcctcagacctgctttctctttctagggcctcagcctgaagcttggaattgagtttgggactgaaaaagcatttcagaggctgtttatatccatttagtgcctcaaataagccctgctgaatttgcaattatcagccagcaggggtcactcctctgttaacttccctattagaaacagagcggtggggattctcacttagaaaagaaaaaaagagaaaaacagttaaagaggcaaaaagtggggaatgctgggggaagaaccccttgcttagtgcaagtgggcccctctaatccttataactttcccatccttcccccagttcagaccaggttgaattccttggccatggaaggaaaggttccattgatgcagtgggtgagaagcactctgtagggtcctggctaccatcggttttctcacacccccctcatcccaggcagtggagggagacacttctgcgacattgctccccctgccccttcatggctattgggtgtggcctttgcctgctgcaggcatgcctaggtgctggagctgggagggaaaagggtaaggagaggtgccctggaagccgctcatgcctggggctgtcaaggtggaggcatacatggcacctctaggaaaaattggtctgatttgcacctttggcggctgagccaaatgctcattttacttagtaacattgcctcagcctgtagcaaaactcttaacattataaaggaagagataagatccatttcaaataatgtgtgagagagaaaagagatgaaaggaaaacagagtcttttacctgcaggaaagggagagaagtggcagagttttggaagaaaggcaggcccaacagtttcccattcactcacactcaccttccgagatcccagacgagccaccagttgaaatgggaaaagtttccttgtccccctcacaggaggtggagtgggggtgtggcttgcttctttagtactccgctgctcaaacctctagggaagcatacagactggcaagttgtggggctacaaccccatggcagcatctaggggtagatgtttacagctgctgaagccccagtggacatgtggtaccatgtgctcttttagttttgccatctataggtggctttgtggtaaccagctcaattagacccattccttaacccaaagacagagggctttctgtatcccgcggttgttacctaggtgtaccagaaaaatcaaatcacacgtggtcttggagaatgagtgcaaggttttattgagtggaagtagctctcagcagatgggggagccaaaagggagaatagttttcccctgaagtcgggttattcagcggcccaggctctcctctggctgccccagccaaactctatgtcaatccattggtcggtggcctgccagagtgctggtgcctgttggtggattcctctcagcgtcgagagtttttccctctcaggaaagggagagaagtggcagccacccatgtgttcttgcactgatgtgctcctctcgacgtccaacctcctgtgtgtctgcctgctagggtcccagagtttttttaggcacaggatagggcatggtgggccagggtgatcttgggaaatgcaacatttggtcaggaaaacaaaaatgcctgtcctcatctaggtccaggggcacaagcccaggtttggagccctagccagggaccccggcctcctctacccatcactttccttcaccttttctgtatcattcaaagggaccatgcccttcccttcccagcacttctcttctgtatcaataggtgatgtttttaaaatttcccaactctagtgcaggcatggtactagacatatacatagaaataaaaccacacttattcttctggctggcaagacatagtatttttgccaaattatgtgttgttttgaagcattttatgtacccctggtcatataaaaataaagctattttgttcagtacaaacagcagcattttctggattagaaagttaatcatcttaaaagatcatcacggatttttccattgcactcatcactaattgctttggcaaaaaatttcttatctcacgcatgacaaaatcagccgcagtatctcctagtaatttaatggtgatgatctttataaaggaaataagcacatcaagggaaaacataattttttttaaaaaaagagtaataaaactttttaaaagtcttttttaaaagactgcttttctaaaatagtaaaataaaactccaccaataaaaccaccaacaaaacagaaaagaaaaaataatgatatgatcggagctatttgatgaaagatggtaaattaaatttaaaatgattagaagagaaaaagcaatacctgtctcccgtaggtctcagtccaggttctgctatgcctttctcctggtgagccacctatttaagagtcgcttaaagcatatgttaatccaacaacagcagattaaaaaccaatgcaatctgaactatttgatctaaaaacataaataaaatttaaaacaaataaaagagaaaaagcagtacctgtgtcctgtaggtctcagtccaagatctgctctgactcccttgtggtgagttagccctttagaagtcacttggggtggggcatatgttaattccactaacattggttctggccaatgagtcaggaaggtggtaaatggcaccttttcttcttgctgatttctttcagttcctttggagtctggacattagtcctttgtcagatgcctagtttgtgactactgtttcctatactgtgggttgtgtgtttaccctgctgatatttcttctgccttgcagaagattttcggtttcattaggtcctattgatcttattctatttttatatttttgcgtttgcttttggggcattagtcatgactacttggcctaagccaatgtctagaaaagctttttggatgctatcttgtagcatttttagactttcaggtcttagatggaagtttttatatgctttgttaaagatcaggtgactgaaagtaccgggctttgtttctcggttctctattctgttccattgctctatgtgcctatttttatacttcctgcaccatttattgaataaagtgtcctttccccaattagtgtttttgcatactttgttgaagattagttgtctgtaagcatttggctttatttctgggttctctattctgttccattgctctatgtgcctatttttatacttcctgcaccatttattgaataaagtatcctttccccaattaatgtttttgtgtactttgttgaagattagttgtctgtaagcatttggctttatttctgggttctctattctgttctattgctctatgtgcatattttataccagtatcatgctattttggtgattgtagccttgtagtataatttaaagcctgccttcagatttgttctttttgcaaagtattgctttggatatgcggtcacgtttttggttttgtataaattttaggattcttttttctagttctgggaaggagaatgatgatattttgatgagaattctactgctctgtagatggctttggagagtatggtcactttcacaatattgattctacctattcataagcttataatgtgttcccatttgtttgtgtcaactgtgatttctttcagcactattttgtagttttccttgtaggaaacttacattaacctacttggttaagtatatttctaagtattttacttattaaaaattctcagggaaatgcaaagtaaaactgaggtgggaaattaaagaaaaataaaattaaaaagaaagggaaataagctttcttgtattaagctaacttgtcccagaggcagcaacaggcacagcccagacccaggaaaagtcttgataatattatttattgtattctggagactcttccagcactccttcaatgtagggagaagaaaaacaaattttcctttgttttatggtatgagtttatagattcttgttctctttaactagtaacttcaagtattctgttttatctaagaagtatggcaaaggtcatgagaagcctgagcaggcctgaactacagctctctaggcaccatagtgaagataaaccaatgcaagcctctttagagcaaaacctagataatagacatctgggttgcatagcaacagttatgtgcaatcctgagttatgaacctgttacaatttgattaactgtctttttcctgcctctgtatccctgctttcacaccactgtaagcttgcttcaagctggcccacccccttttgtgaagtgtgtataaaagtcaagtgctgtctttgttccaggccctgtctttggacgtgagtctgctgggcctgagagcactcaataaaagattctcctgttttaacccaaagcctctctctcatcctcctaaatcccacaacaaaaccacaatgagatgctatcttaatcttgctagaagcccataatttaaaagtcagaaaacaatagatgttggcatagatgtggtcaaaagggagcactttgacactgctagtgggaatttaaactagtccgaccactatggtaaacagtatggggattccttaaagaactaaaagtagaccattcattccagcaatcccattactggctatctacccaaaggaaaagaagttattccataaaaaagacacaagaatatggatgtttatagcagccgattcgcaattgcagtgatatgggaccaacttaagtgcccatcaacgaacgagtggataaagcaaatgtggtacaccatggaataatacttgataataaaaaggaacaaaataatgtcctttgcaacaagttggatggaactggaagccattattctaagtgaagtaactgaggaatggcaaatcaaatattgaatgttttcacttttaaatgagagttaagctatgagaatgcaaaggcataagaatgatataatggacttggggactcagggggaaaggttgggagggggatgaggaataaatgatgacatattgggtatattatacactgctcaggagacagatgcctcaaaatctcagaaattaccactaaggaacttttatccacataaccaaaaaccacatatattccacacactattgaaagaaacataaacattattttaaaaaataaagccacttttaaaattagcaaaataaaataaatatgtcttcagagtttagatattggatccaaattagacagatcaaatactgcctttactaaatattttcatgtcattaacaacttctaaaacctttcaaacagttttttgacatgtcttggaaccatccatttctagctaaggcctgggcacctgtgaaatagggccatgcccccccttatactgggaagagtaagatatttcaagactaagatgttttctacagctccatctttttctttaagctctacatcaaggacataattaaaattggttgtctcctaagtggtttactaaaaatgcatacttaagagttaccattataattaatatttgtatctaaagctacttaaaaattttcacacacaaatctgactgaacaagtaaaatatattttaagtcaaagtttataaaaggacatgagaacatagcttttatgaaaaaattagttttgtcaagtttagaggttttcaaatattttaaattcaggaaataaaataacaaaaagacaaaagaaaatggttgaacaacttagaaaaggtttgttaaaattcatcttataaaacaatctacatgtaaaaagtgggctaaaatttgaaagagattatttaggttttccataaattaatccagaaggggtaggaagtcttaagaatgaggaaggacaggaggaaggggaggtcatcctgacactgcagaggcagaagtgcagctgaaggtatgaaggctaagaggggaggggagtttgagtgctgctgcctggctgtcagagcagaggagggtcctgggcaccagacttgaggaagggatgaaaatgctgggcagacctgtagtgggcccttgagatggcagatagtggtttccagagagagggccattgttttccagtgcccagcactgagcagagagagttttgggcagtgtaaaaaaaaaaagagaacttacctctttctcgttttagaaaaagaacagtctaagaatatcagcagggaaactctcagtgcttcaaggggttaaacgcccttttggctttcttgtgttggtttcatcatagaggaggagaaacttcttggaagtgttcctaaaaacacaacacgtctgcttctcctttcaaaaaaggaagtgctaaaacacgaacactctagatccaaatattaatacggatgtctaaatgcttccgttttccaaggggcagaaagctaaaggttgtaacctattcatttcagtcaaagttggtgaaagggaagcaaaggaactgggtggggcttggaaggatgacgaagctcaagctcattggccagcaacctctctcctgggggcgggaggggtgagcatacgtcattgctttggcttctataaaatgaggaggactcaccgagtgtgaagagtccttctggtgattgcagctgagagcacactcacgacgttctgcaaggattctctgattatgattctgaagggaaaagcgatggaatggacagcagagattgtaattttctttatcttgaattacggaagaaagtatctaggacagaaatccacgacaagtccttggaaccagcagatctcttcgttcacggagacgttgacgtattctctattgaagaagattcttaccttcttactggacaaggttttgtcagttctgcgtgactggattgtccgggagactctgaggaaactgatgtcacatgtttttccaaagaagatgtttctggaaccaacaactgtgattgtggtttgaggacttctgagagttccagtacaggaaataagcagaacatcagctggaggctaaacggatccagacttcactcttcacttcccttcctattcagtctattgtgcctgctgactgagaagcttggctggtatgtgagcaaataaacggaactattcagaaggagatgttgacatattctgtattgaagaagatccttatcttctcacctgacaaggttttgtcagttctgtgtgactggattgtccggaagactctgaggaaactgatgtcacatgtttttccaaagaagatgtttctggaaccaacaactgtgattgtggtttgaggacgcctgggagttccggtatgcgaaataagcagaacatcagctggcggctgaagggatgcagcctccactcttcacttcccttgccattccatctattgtgtctgcctgactgagaagcttggctggtatgtgaggaaataaacggaattataaacaaggagattgtttctcatctacttcattctgttgtggcttttctattttggggttcagggtgtgtgacaaggaccaaggagatgaaaggtttcatgatggagaaagcccaggcaatcagattgaagagctatccacagggaatcttggctgctgaggggctgcaccctgcaacggactgaccatatgacagaaaagggttttaaaggctcaacttctggactgagaacccagagtaatttgggaacctcctctgtgaggagatatgaaagctgggaatcatgacatccctaggaatggaaggcacatttcctgatggaaggggtgctttggaaaacaggagcagagtagacacagcagccttgtggatacgggtgggcagcatgcatgggtgatgtgaacgtggagtgtttgtgatcgaaactcaaaatgtctgacaaagtgaaaacctagaaaccacaatgaggaggaagagtttgtgagggcaatcactctccccatgtgtgaaaatcgggggctcttaaaatctcatctggagaggtgcagtctaccaaactctgggactttagcctccccttttaaaaaaccgtgcatcaataccaacgtccgaaaccacagaaataacacctggcttgcatggagacaaggacaaaaagccgtcatgatgagttgttctgctcacttgctgcctctgttcagtgcacaggatattgtccacccactagcaggctactgcaagagaagtgtgcaatatgttccctatgtgccatatatgtgccatatggcccatatgacaactgagtcagaaaatatctgatgccctcagagttacactccacctggagcttgcccccagccatccaggacctaggctccctaccctgtccaattttctggtgttttgggggcttcattctctaaggtgtgcccactctttactcaaaccaaaacacccacatattcctgcccatgaacaaccaatcaaccacttctcagttccacatcctgctgttgggtctctagtggtgacactgtaactcccaggtcatagtggtgacactataacacctagctaaattgatgccttgtctctaggaggccatgggctcctgcaggtctcatctgactctctgtagccttccctgacaatgctcacaatacccaagccagagccacattgacagcaagctgctctcatcttacctttgccagacctggccactggaaaaggctgaccctcatcctgcaatgcctatacctccaacctttgtctcaagctggtgtcctggagggacttctaagcagaaaacagattcagactcccatcctctcctgaatggcctcatatccaattctcagaccctcagccttcattgtaaggacacttcatccatgcccttgagtattctgtctgcactgtgtattctgcaatagattctcctccctctgcgaccctcaactccttccgcagactttttgttttcttgatcatctaccatagtcttccactgggacactgccaagcccattctggagagtgagttgtgcaagtacactgccccccatctacctttcgggaggtgtatacacccttctttctcccaggtctggaggctttctattttcatcctgaggcatctccacctgctcttggattcttcaaattgacaaccaccagttaacaagaactatgtgtcaccaaatagccaaacaatggcaattacaaaaataaaattaatagctgtaacccccattagcaaggatacacaaatcaaatcagggatagtgggtgaggaagtctgcctaacattcaaggaaggattctgaagtgatacaaaatcattgcctttgctatctttagaatggacactttcagccaggcacagttgctcagcctgtaatcccagcactctgagagccccagttgggtggatcacttgaggccagcagcttgagaccaccctgggcaatgtgcagaaaccccaactctactaaaaatacaaaaatagccagttattgtggcacatgcctgtaatcccaactccttgggaggctgaggcacaagaatcacttgaatctgggagccagagtttgtaatgagcgaagatcatgccactgcactctagcctaggcattagagtgataatctgtctgtggaaaataaaaacattcctcttcaaagttttcttctttaaatcataaatgttggaattaatatatcctctttgaaactcactttcttcaagcttctttatttgatggtagtaaatctttgttaagctttatgaggcaagagtaatggaagaagcatattatatatatttatactctaacctcagtgcttgttctagcaagctcaggcatgcgtgaatgtgcccaggcatgttccagcccataccttatatcctttccttattgggaaatgctgttactcctataagcattcttgtaagcaacttcctctttttctttgtctccactatctttacctattgaggacagttttaggttcttagccagttggatgtagcatagactgtgaggtccaaccccagccaatggagatagcacacagcagtagcgacctcatgcttaacagataaatattcctgtctccctttgtttggggtgctctcagctgatgagcaacaccctttctaaagaaattaaagttgtcttgctgagaaaacttttggtctaaatgctgattcttccttgcagcactgaagaagaagcaattatttccaacactttctcatacacaaaaaaagaagaaggtggaagaaaactttcttgtgcaccctatccctcactcagaaagacaacagaaggctcctagtggcaagccctagaggattcatttcttttgggaaccctcttggctgggatactaggactcaggtcaaactcagcattttcagtgtgtgggaagtgtgcttgggtttcactgttacttccaataatgtgatttggtccttggggttcaccaaattttggtatggagtggtgaaccctgttaagtttaagtgtctataaaattaacaaagcaaaataaccattctgccccatggttcagagaccaaatattgtgtaggaaatgctttagcgagagaaacagagaagaataaaaaatgtcctcaagcgctgcattatttcttgttatcgtccagatcttagaggaaaggctttcattttccctcattcagtatgatattagctgtgcatctgtcatttatggcttttattatgttggggtatgttccctgtgtatgtagttttttcagggtttttgttatgaagtgatgttgaactttatcaaacgtttttcagtttcagttgaaacgatcatatgctttttgtccttcattctcttgatatgatgcatcatgttgatgatttccatatggtgcactgtccttgcatcctgggcatgaattccacttgatcatgacaaatgaatttttaatgcattcttgaattccgtttgctggtattttgttgaggatttttgcatcaatattcatcagagatattggcctgcagtttctttttttttcttttttctttgttttgttgtttgtttgtttgtttgttttgatgtgtctatgtctggttttggtatctgggtagtagtgttccatccccttttattttttagaataatttgaataagactggtgttggttctttaaatatttggtagaattccgaagtgaagtcattgggccccgggcttttctttagtggaaggctgtttattatggcttcaatctcgttacttattattggtctattcatgttttgaatttgttccttatttaatcttggtaggctgtgtgtatctaggaatttgtccatttcttttagattttcaaatttattggcacataattgcccattgtagcctctaatcgtcatttgagttcctgcagtaccaattataatgtctccttcttcatttttgattgtatttatttggatcctgcccctttttttcttacttaggctgcctaataatttcttaattttgttgaactttttcttttgtttgtctcgctctgccaccaggctggagtgtagtggtgtgatcttggctcactggaacctccgtctcccaggttcaagcaattctcctgcctcaccctcccaaatagctgggactacaggcaagtgccaccactcccagctaatttttgtatttttagtagacacgggttttcaccatgttggccaggatggtctcgatctcttgacttcataatccacctgcctcagcctcccaaagtgctgggattacaggcatgagccactgcgcccagcctaattttgtttaaattttcaagaaatcaacttcttctttcattgatttctgtattttttatttccattttatttatttaaactctaagctttattctatcttcttctcattttagctttggtatgcttattgcctctctagctctttaatgtgcattgttagattgtttatttgaagttcttcctctctacaccataagacgtaagcatgtcctcattatgtcataagatgtaaccacttacagctataaacttccttcttagttctgcttttgctgtatctcataggctttgttatgttgtgtttccattatcaattgtgtcagaaatttttcaatatttttcttaatttcttcattgagcaactgatcatttgggagcatatttttaaacttccatgtacttacatagtttccaaaatacctcttgtgatcaatttctagttttattccactatggttcaagaagatgcttgatattatttcaattttttttcacattttaagatgtgttttgtgacctaacatatggtctactttttttttttattaaactttaagttgtggggtacatgtgtagaccgtgcagttttgttacataggtatacacgtgccatggtggtttgctgctcccattaacctgtcatctacattaggtacttctcataatgctatccctcccctaacctccaccctctgacaggacctggtgtgtgatgttcccctccctgtgtccatgtgatctatttttgagaatgatccatgtggattagaatgctgtggaaaagactttggattcctaatatccagggagggagacgatgatattactttcaatatcacacgggtgtacacactctctgtgacattgttcctaatatccagtggaagagaggatgatataacacccagggagggagaggatgatattactcttaatattgcagggtgtgtacccatgcctatgatattgttcctaatatcaggagggggagaggatgatattactcagaatatggcagggggtgtacacacactctgtgacatggttcttaatatacaggggagaatgggacaatattactctcaatatcgcagggggcgtacaaccctgtgatttgttcctaatatacaaaaggggacagtatgatattgttcctaaaatcgcagaaggtgtacaacgccctgtgatattgttcctaatatccagggcgggagaggatgatattacccccaatatcacagggggtgtgcactttccctgttacattgttcctatgatccgagtggggggaaatgacattagtcccaatatcgcaggatgtgtacactactcccccatgatattgttcctaatatcaagggggagagaggaggatattactcccaatatcgcaagggaggtacatcctccatgcaatattgttcgtaatattcaggaggagagaggaagatattactctcaatatcgcagaaagtggacacccaccctgtgatgttcttcataatatccagggaagcagacgattatatgactttcaatatcgctgggagtgtacatcccttttgggatattgtttctaatatccaggaagggagaggattatattacttccagtattgcagccagtgtacacatttcttgtgatattgttcctaatatccagaaagggaaaggatgatattactcccaatattgcaggtggtgtacacccccctctgatattgttccttacatcaaggaaaagaaagaagaatattactcccaatatcgaagagagtgtacacccctcctgtgatattgtatttaatatccatggggaaagaggatgttgttactcccaatatcgcagggggtttacacccacactgtgatattgttcctaaaatccagtgaaggagaaaataatattgctcccaatattgcagggtgtatacaggccctcccccgttatattgctcctaatatccagcggtggagaggatattactttcaatttttgcagggagtgtgtaccccctctctgatatttttctaatatcaaggatgggaaaggatgccattactcccaatatcgcaggaggtgtacatgccctgtgatattgttcctaatatccagggaggtagaggatgatattactttcaatattgcaggggctgtacaccctctatgatgttgttattaatatttaggttgggagaaaatgatatttttcctaatatcctgggaaggaaaggatgatattactgtaaatattccagggagtgtacaccttcctaatattctaatattgttcctaatatccaggggtgggagaggattatattactcccaatatcgcagtgggtgtacacccctcctgtgatgttgtttctaatatccaagcgaggagaaaatgatatcactctcaataccgcagggggtgtacaccttccccatcatatcgttcctaatattcagagggaaagaagatgatgttactttcaatatcgcaggggttgtacacaacccctgtgatatttctcctaatatccaggaagaaagaggatgatattgctcccattatagcagacggtatacgcctccctgtaacattgtttctaatatcaagactgggagaggatgatatcacttccagtatcgcaaggggtgtacacctcccccgtgatattgttactaatatccagggggaagaggataatattactttcaatattgcaggggctgtacacccccgtgatattgttgttaatatttaggttgggagaaaatgatattagtccaaatatcgcagagagtgtacacacttccgataatattgttcttaatatccatgggggagacgatgatattacacccaatatcgcagggggtgtagtctccccttgtgatattgtccctaatattcagggaagtaaacgatgatgttagtgtgaatattccagggagtgtacaccccctttgtgatattgtcctaatatccgcaggagagaagataatattactcccaatatcgcagggggtgaacacaccccctgtgatattgtttctaatatccaagcgaggagaaaataatattactcccaatgtctcaggggatatacaccttccctatgatattgtttctaatattcaggtggaaaacgggtgatattactcctaatatccaggaagaaaggggattatgttactccccttatagcagggggtatacacctcccctgtaatattgttcctaatatcaaggctgggatatacgtggggggaaggatgatattactcccaatatcacaggggttataaaaccttctgtgatattgctcctaataaccatggcggaagaagatgatattactcctaatattgcaggaggtgtacactcccccattatgttgttcctagtatgcagaaaaggagaggatgacattattgccaatatcgcagggtgtgtacaccacccatgatattgttcctaatatttagagggacagaggatgatattactcccaatatcgcagggggtgtacacgcatcccctgtgatattgttcttgaaatcgaggggaaagagaattatatttctctaaatattgcagagggtgtacaccgccccctgtgatattgttcctaatagccgggggcggggggagataattaaattactttcaatatctcagagagtgtacatcccccttgtgacattgttcctaatatccagagcaaaagagaatgatattcctcccagtatcgcaggaagtgtacatttaacctgtaatattgtttctaatatccagggggaagagaatagtaatactcccaatatcgtaggggttgtacaccttttctgtgatattgttgcaaatatttagaagagagagagaatattactcgcaatatcacagggaatgtatacttcccctgtgatattgttctaatatctagaaaaagagaggataatattactcctaatattgcagggggtgtacacccccacttgtgatattgttcctaatataaaggaaggtcgaaaaacaaacggggagcccagggggaaggaaggcaggcgaggaagaggcagcgccggggcgccggagggagcagccgggccgcggaagcgcgagcacgagaccggtcgcggtcgcagtcgcatttttgccgttgtcgcggccgccgccgccgaggcttacccggggatgtctgagcccgcgcctcgcggcccccaagctccacgctgcgcccgctgtcccggcctctaagggccgccacgtccctgcggcgcgcgcaggcagaaagcggcttcgtgccggcggagggggcccgggcgggccgggaaaggctgccccaggccccgcgcctaccccatcaccgcggccggcgccgggccgggaggatgagcggtgtggggctctgaagcatggagggggttttgtacaagtggaccaactatctcacaggttggcagcctcgttggtttgttttagataatggaatcttatcctattatgattcacaagatgatgtttgcaaagggagcaaaggaagcataaagatggcagtttgtgaaattaaaggtgacagctttggaggggaccacccttgattggatacataaattctgttcattcagcagacaacacaagaatggaattaatcattcctggagagcagcatttctacatgaaggcagtgaacgcagctgaaagacagaggtggctggtcgctctggggagctccaaagcatgtttgactgatacaaggactaaaaacgaaaaagaaagaagtgaaaccagtgaatcgctgaaaaccaaaatgtctgaacttcgcctctactgtgacctcttaatgcagcaagttcatacgatacaggaatttgttcaccacgatgagaatcattcatctcctagtgcagagaacatcaatgaagcctcttctctgcttagtgccacgtgtaacacgttcatcacaacgcttgaggaatgtgtgaagatagccaatgccaggtttaaacctgagatgtttcaacggcaccatccggatcccttagtttctcctgtgtcaccttctcctgttcaaatgaggaagcgttctgtcagccaccctggttcttgcaccagggaggagtagccactgtataaaagaaccagtatctgcacttcaccgactctcccagcgacgccgaagaacctactcagatacagattcttgtagtgatattcctcttgaagacccagatagacctgttcactgttcaaaaaatacacttaatggagatttggcatcagcaaccattcctgaagaaagcagacttatggccaaaaaacaatctgaatcagaagatactcttccatccttctcttcctgaagaaactgtagtgtccaactttctctaagtattgctatgcaaaagctgctgtaattgaactattgttatagggagtagttttttcccttaggactctgcactttatagaatattgtaaaacagacaaacaagaaaacaaaccacatacttttgaagcgtgttttatctttatatagtttgtttgcaagagtattttcctaataacttcacagtatgaatgtgcatcttttttttctttttttaacaaatgatggtgtaacattttgacatccataaggacaaatgtagatatttttctaaaaaaccgtgaggggactgacagcttggtcagggtgtattgtagcttataaacatgaaatcttacaaggtttcagtttgacagaagtgtgatatatgtaacttgtgccatggaccaaatggtcactttaccacagctaaaaatgagttatgatagcagcttgatggtgattgcattgtattcctttaatcaaaaaggaaacgcaatattctaagtatctttagcccaaataccatgacatattgagcatctttaaataaccagactgtattgtccttcatatgtgaagttgacactactgatttgtcaataccaaattttgggttaaagtgtttaatttttatttatttattttcttgttgcctcaaaagatgattgcattctaacttttgtgacctaccaaatttaagatgtgtatacattgttctttacgttgttctagaaaagagattttaatgctgtagtgacttagctcacttacatcagagaaataaacaactttcaatggaaaaaaatatatataaaggaaggaagaggatgatattacttctcatatagaaggggttgtacaccccccttgtgatattgttcctaatattcagggagggagaggattatattactcccaatatagcagggagtgtacacccccccccccgtgataatgttcctaatattcagggaagcagaggatgatattactttcaatatcacagggggtgtgctgtccccctgttatattgttcttaatattcaggggggagaggatattattatgcccgatatcacaggagaagtacaccccacaagtgatattgttcctaatatccaggggtaaagaggatgatatcgcaggtggtgtacacccctccccgtgatattgtttctaatataaagaaggagagagcatgatattactcccaatatcgctggaggtctacaccccccttgtgatactgttcctaatatccaggaagggaaacaatgatattgctgtgaatattccagggggtgtacacccctttgtaatattgttcctcatatccagggggtagagaggatgatattactcccaatatcgcagggggtgcacggccccactgtgatattgtttttcatatccaggaggggagaggatgacattactctcaatatggcagggggcgaacaccccctgtgatattgtgctagttaggttgggagaaaatgatattactcccaatatcgcagggggtgtacaccgctcctgtgatattgttcctaatatccatgacgggagaggatattactcccaatatcgcagggggtgtacctctcccctgtgggattgttcacagtatccaaaagggaagaggatgatgttactcccaatatcacagggagtgtacaccaccattgtgatattgttcctaatagccagggaagaaaacgatgatattattgtgaatattacagggggtgtacacaccccctgtgatatggtttttaatatacaggttggaaaaggatgatattactcccaatatcacaaaaggtgtacacacccccccatgatattgttcttaatacttcggtggggagaaaatgatattagtctccatatcacaggggtgtgaactcctccggtgatattgtttttaatatcaagaggggaggagatgatattgctttcaatatcgctgggggtgtacatccctcctgtgatattgttccttatatccaggcgaggggaaaataatattactcccaatagtacacaccccatgtggtattgttcctaatactcagggggaaagaagataatattactttcaatatcacagggtttgtacacctttcctgtggtatagttttcaatatccagggggaaggtacatgatattactcccattgcagcaaggggtgtacacacctcctgtgatattgttcctaatatccagaagtggtgaggatgatattactcccagggggtgtacaccccacctatgatattgtttctaatatccaggggaaaagagtgtgatattatgcccaatatcgcagagggtgtacacttatcctgggatattgtttctagtatttggggagggaggagaggatgctattattctcaatatcgcagaaattgtacacccccgctgtgatattcttcataataatcagggaaaaagaggatgatattactaccaatattgcagggggttacacttcccctttggtagtgttcctaatatccaggaagaaagaggatgatattaatcccattttccaggaagtgtacacccaccgtgtcatgttgttcctaatatccagcagggaagaggatgatattactcccaatatcggagagggtgtacacttcccctgttatattgtttctaatacccagggggaagaaggatgacattactgccaatatcacagggtgtgtaccccaccctgctattgttcctaatattcaaaaggaaagatgaaaatattactcccaatatctcagggtgtgtacacctctcctgtgatatcgttcctaatatccacaggaagagagaatattactctcaatattgcaggggggtgtacacccccctgtgatattgttccaaatattcgggcggggagaggatgatattagtcccaatatcgcagggggtgtgcaccaacctgtgatattgttcctaatatccatgcgggggaggacgatatcactctcaatgtcgcaggaagtgtacacctctcttgttatatttttcttaatatccaggagggaaaagatgatattactgccaatatcgcagggtgtgtccaccccccttttatattgttcctaatatccaatggaaaagaggatgacattgctctccatatcccagaaggtgtacaacgcccctgtaatattgttcctaatattttgggggaagagaggatgatataacttataatatcacaggaggtgtacaccacccctatgtattgttcctaatatcctttaagggagaggatgatattactcccaatatctcaggtggtgcctattccccctgtgatattgtttttaatatccaggggaagagagtatgatattacgcccaatatcgcagggggcatacaccctctctgagatattgttcataatatatagagggagagaggatgatattacttccaatatcagaggtggggtacaccccccggttatattattcttgatatccaggaggggagaggttgatattactggatatatagcagggagtgttcacatcttctgtgatactgttcctaatatccagaaaagtagaggatgatattactcccaatatcgcagaacgtgtacacctccctgtgatattgatcctaacattcaaaggggagaggatgatattactcaaaacatcacagggcatgtacactcccctgtgatattgttcctagtatccagaagggagcaagataatattactttcaatatcgcagggggtgtacacccctctttggtatgtttcctaatatccagaaggaaagagggtgctattactttccatattgcaaggggtgtacacccccctgtggtatggttcataatatccagggagggaaagggtgctattattccccatatcgcgaggcatgtacaccctgctgcggtacggttcctaatatccagggggaaagaggatgctattacttcccatatcgcggggtgtgtacacccccgtgtggtatgttttgtaatctccgggaacgaagagggtgttattacccctcatatcgctggaaatgtacactcccctgtggtacggttcacaatatccaggggattgagggtgctattactccccatatcgcggggggagtgcacctccctgtggtatggttcgaaatatccagggtaagagagggtgctattattccccattttgcaggaggcgtacacccctctatggtatgttttgtaatatcccaggtaaggggtgctattgagagaagagagcaaaagaccccccccatattgttctgtattattttatactcagtacctgttttaagaagaaacaaggaagcgaaaccaaaggcaggcagcccggcgccaggcaccagatccaaaaccagacccgaaaccaggcctgggccttcctgaccttagcctgaaagttaaaattcaacccatgacctagcaactgatgttatccatagattccagacattgtatggaaggacattgtgaaatttcttgttctgttctgtttcactctgagtactggtgcatgcagcccttgtcacatacccactagattgctcaatcaatcatggccctttcatgtaaaaaccttagtgttgtgagcccttaaaaaggacagaaattgtgcactcaacaagcttggattttgatactctagtctgctgatgcttccagctgattaaaagccacttccttcactacctcggtgtctgtgggattttgtccgcggctcctcctgctacactgtgactccccttatagagaggggtgtacacccccctttggttcctaatatccagcgggggagtaggtgctattactccccatattgcggggagtgtacacccccttgtagtacggatcgtaaaatcaaggagggagagaaggtgtaattatccccatatcacagggagtgtacacccctttgtggtatagtttgtaatatccacgacgggagagaatgctattactccccatatcgtggagggtgtacaccgccctgtagtatggttcgtaatatccggaaggggagaggttgctattactccccatatggtgggaagtgtacacccccatgtgatatggttcataatatccaggggggtagaggatgatattacccacaatatcatagaaggtgcacacccttttgtgatattgtccataaaatccagaaggggagaggatgatattacttccaatatcacagggggtgtgtagccccatatgatattgtttgtaatatcaaggtagggagaggatgctattccttacaatagctcaaggggtgtaaccttcttgtgatattgtttgtaatatccagaaggggagaagataatttttttattttaaaagtaaactttaatgtcaaaaatgcaaacttgagaagggcagaaagatcaaacagaaggctgccacttcacaattggagggttgcacagtggccgggcagaggcgctcctcactccccagacggtgaggcagccgggcagaggtgctcctcacttccgagatgttgcaggagccgggcagaggtgctcctcacttcccagaacagggggctgccgggcagaggtgctcctcactgcccagacggtttgcaggcctggcagaggcactcctcacttcccaaacggagcagcggcaagccagaggcgctccacacttcccagatggtggggcagccgggcagaggcgatcctcacttctcagagggtagggcggcccagcagaggcgctcctcacttcccacatggtggggcggcaggctagaggcgatcctcacttcccagacggtggtgtggccatgcagaggtgctcctcacttcccagatggtgtggccgccgagctgaggcactcctcacttccctgacagtggggcggctgggcagaggcgctcctcacttcccagacacttggactccgggcagagactctcctcatttcccagatggtggggctgccgggcagaggcgctcctcacttcccagacggttcagaggccgggcagaggcgctctggggagaggataatgttactcccaatatcgcagggggtgcacactccctgtgatattgttccgaatatccagagggggaaaggatgatatagctcccaaaatcgtggggagtgtacacccccctgtgatcttgtttgtaataccaagaagaaaagagaatgctattatttccaatatagcagggggagtacaaccccctgtgatattgttcgtaatatctagggggagagaaaattatattagtcttaatatctcaggggacgttcatccccctgtaatattgttggtaatattcagaatggagaagatgatattgttcttaaaatacaggaaaaaatatgataatattacttccaatatcgaagggggtgtacactctcctgtgatattgttcccaatatccagaatgaaagaggatgctattactcccaatatcccagggagtgtacacccctttgccatattgttcataatatccaggggaagacaggataacattactcccaatatcaccgggggtgtccacccactagtgatatttattgttcatcatatccagaaaaggagaggatgatattactcccaatattgcaggtggtgtacggtccctgtgatattctttgaaatatctagaaaaggagaggatgatatcactccgagtatcacagggggtgtacacccccctgtgatattgttcgtaatatccaggggagaaaaggatgatataattgccaatatttcaggggatgtgcacctccctgtgatattgtttgtaatatccaggggtggagaggatgatattactcaaaataacgtaaacatcctgtgtgtacatcccctgtgatattgtttataatatccaggggggtagaagatgacattacccccaatatcacagagtgtacacacccctgggatactgttcataatatccaggcgggaaagaatgaactacttccaatatcgcaggatatgtacacccccctgtgatatatttcctaatatttatgtgggtaaggatattacccccaatatcacagaaggtgtacatcctctttgtgatattattcctaacatccaggaaaggagagaatgatattactcccagtatcgcagggggtgtacaccacccctgtgatattgttgctaatatccagggggagaggataatattactcccaaaatcacaggggacgtacactcctcctgagatattgttcctaatattcatggggaaaagaatgctactactccaaatacagcagagggtgtacaccatccccgtgatattgttttttatatccaaagggtgaaaggctgatattactcccaatatcgcagggggtgtacaggccccccatgatatcattcttaatatccagggaggcaaagaatgatgttactcccaatattgcaggctgtatacaccccccgtgatattgttcctaatatccagagtaagagaggatgacattgctcccaatattgcaggggttgcacgcacgccctgtgataatattactcccaatatcaacagtgggtgtacactcctcctgtgatattgtttgttatatctaagaaagaagaggatgatattactgtcaatatcacagaaggtgtacagccccttgtgatgttgtttctaatatccagcggtgagaggatggtattactcgcaatattgtagggggtgtccaacggccctgtgatattgtttctcatattcaaaaaggaaaagaataatataactccaaatatcgcagggtgtgtacacttccctgtgatattgatcctaatatccaggaagagagaggatgatattaatcccaatatcacagggggtgtacatcgcttctgtgatattcttcctaatatccagggggggaggggatgctattactcttaaaatcgcagggaacttacactcccactatgatatttttcctaatatccaggaagggagaaaatgatattactcctaatatcacatatcacaatgggtgtacatctccccgtgatattgtttctaatatcaaggatgggagaaaattatattactctcaatatcgcagggggtgtgcacacctcctgtgatattgttcctagtatccagcggaggagatgatattactttaaatattgtagaaggtgtacaacccccctttgatattgttcctaatatccagggggaaaggagatgatattactcctaatatcgcaggggctgtacaaccctatgtgatattgtttcttctaatatccaggggtggagaagataatattactcctaaaatcgaaggggacatacactccccctgtgatatttttcctaatatccagaaggaaagaggatgatattactcctaatattacaagaaatgtatacctgtcctgtgatattgttcctaatatccagaggggtaaatgattatattactcccaatatcgcaggggtgtacaccttccctgagatattgtttctaatatgcagtggaggagaggatggtattactcccaacatcacaggagatgtaaactccccttgtgatattcttcctaatgttcaggacgaaggagggtaatattactcactgtattgcagcagggggtgtagagccccctgtgatattgtttttaatattcaaggttggagaaaataatattccttccaatatcgcatggggtgtacacccttctttttatatagtttctaatatctggggggagaggatgatattactcccaatatcgcagggggattacacccccactgtgatattgtttttaatatccagggtgggagaggataatattactccaaatatcccagggctatacaccctccgtgtgatattgtttctaatatccagaggaagagaagatgatattactcccaatgtcacagggtgtgtacaggccttctttgatattgttcttaatatccatgagggagaggatgatattactcccaatatcgcaaagactgtacaccctttctgtgatattgcttccaatatccagggagggagaggatattacactcaggatcacagggggtgtacaccccaacctgtgatattgtttctaatatctagggaaaatgagggtgatattactatcaatatcacaggaggtgtacactcccttatgatattgttcctaatatccaggagaatgacaggataatattactcccaatatcgcgggtggtgtctccccccactccgtgatattgttcctaatacccagagggggagagaatcatattactcccaatatcgcaggggatgtacacctacatccggcggagtagaagataatattactcacaatatcgcaagaagtgttcaccttccctgttatattgttgctaatatccagggagtgagaagatgatattactttcaatactgagcgtgtacactacccctgtgatattgtttctcatatccagtagaggagaaaatcatgttactcccaatattgcaggggtgaacacctcctttgtgatatttttcctaatatcaggaaagggagagtatgatattacccttaatattgacaggggtgtacacccccctttgatattgttccaatatccaggggggcagaggataatattattcccaatatcgcagagggtgtacaccccccgtgatattgttcctaatatccagagaaataaaaaatagtattatttccaatatcacagggcgtacattttccctgtaattttgttcctaatatctggggggtggggtggcaggataatattactctcaatattggagagggtgtacacccccctgtgatattgttcctaatattcagggtgggagagaatgatgttactcccaatatctcaggagtcgtatacacccccttgtgatattttttctaatatccaggaggcagaggatgatattgctcccaatatcgcagggggtatacacccgagctgtgatattgtttctaatatgcaatatgggggaaggatgattttactttcaatatcgcagggaatgtacactttccttgtgattttgttcctaatatccaggggtggagaagatgctattactatattactcctcatatcgcaggcggtgtacaactccctgtgatatggttcagaatatccagagtgaaaaaggagggtgacattactcccaatatcgggggggtgtacacccctttgtgatgtggttggtaatatccaggggggcagatgagggtgatatcactccccatatcgtggaaggcgtccacttttttgtgatgtggttctttatatcccgaggggagaaggtgatattactccccatatcgcgaagggcatacacccccctgtgatatagctcataatattccggagagtggaggaagatactatgccctatatcgcgggtggcctacaaccccctatggtttggcttataatatccaggggggagagggtaatattgctccccatattgtggagacgtacagccccctgtgatatggtttgtaatatctttggggggcgagggtgatattactccccatatcgcggggagcatacacccccgtgatctggttcatagtatctcaaaggaagaagttgatgtgtacaacttaagggaaaaagttgaagtgaagtgtacacacgccctgtgacgtggttcataatatccaggcgggggagaggagagtgatatttactccccatatcgcgggtgttgtaaactcccctgtgatatagttcataatatccaggggagagaggagggtgatattgctcctcatatcgcgaagggtgtacaaccccctgtgatatggttcataatatccagaagggtagaggacgatgatattactccacatatcttgggaggtgtgatatggttcgtaatatccagcgatgagagaatgatattactccccatatcgcaaaaggtgtgatagggtttgtaatatcctgagggggagagggtgatattaatccctatattgcagaaggactacaccctcccatgacatggtttgtaatatcccagggggtagagtgtgatattactttccatatcacagggggtgtgatatgattcgtaatattcgaagggggagagggtgacactactctccatatcacggggtgtgtgatatggttcttaatatcccaggggttagaggttgatattaccccctttttggggggtgtgtacaccccctgtgatatggttcgtaatatcccgggggagacagggtgacattattccccatatcgaggggatcgtacaccccctgtggtgtggttcataatatccctagggggagatggtgatattactccccatatcagggggcgtgcactcttctgtggtataattagtaatatccagggggcagaggtcgatattcgtttccatatcatgaagggagtacacttccctgtgatatggttcctaatatccaggggggagagggtgatattattccccatattgcggggggacatacaacccctgtgatatggttcataataaccagaaaagaagagggtgatattaatccccgtattgcagagggcatacaccccccctgtgatatggtttgtaatatctaggggaggaaaaggtgatattactttccatattgctgggtgcagacacccctttatgatatggttcataatatccaagttggagagggtgatattacttcccatatcatgggaggtatacccttccctgtgatatggttcgtaatatccagaaggggagagattgatattactccccatattgtggggggcgtacaccttcctgtgatacggtttgtaatatctaggggatatagtgggtgatattactcaccatatcacgggggttgtaacatggtttgtaatatccaggggaggagagggtaatgttactccccatatctcggggcatgtacaccctcctgtgacatggttcgtaatatccaggtcgggagagggtgatattactcctcatattgccgggggtgtgttatggttcataatatcctggggaaggaggctgctatcactctccacatcttgggggatgtacactctcctgtgatatggttcataatatccagggtgggtgagggtaatattactccccatatcgcgggaagtgtacatacccctgtaatattgtttgtaatagaagagagggtgatattactccccacatcgcgggtggtgcccacccccctgtgatatggtttggaatatccagggggatgaggagggtgatattactccccatatctcggtgggagtacatccctctttgatcaagttcataatatccaaaaggaaacaggagagtgatattactccccatatcgccgggggtgtacacgggagggggagtacacccccggcgatatggtctgtaatatccagggaaggagaggagggtgatattactcaccatatcgcaggtggtctacatttacctgtgaaacagtttgtaatatccagggggggaaatgagaatgattttttttttttgagtctcactgtgtcacccaggttggagtgcagtggcacgatcttggctcactgcaacccccgcctcctggactcaagcaattctcctctcccagcctcctgaatagctgggactacaggcgcaccccacaacgtctggctaatttttgtatttttattagagacggggtttcaccatattggccaggctgatctcgaactcctgaccctgtgatccatccgcctcggcctccaaaagtgctgagattacagatgtgagccaccacgcatggcccaaggagaacgatattactccccatatcccagggggtgtatatccccctgtgatatggttcagaatatccggaaggaaagacagggatattacttcccatatcgcaaggggtgtgacatggttcgtaatatcccatgggggagagggtaatattactcttcgtattgtgaagggcatacactcccctgtgatacagttcataatattccggggagtagaggaagatattatgctccatatcgcgggtggcataagccccctgtggtttggttcataatatccagggaggagagggtaatattactccccatattgtggggacgtacaccctcctgtgatatggtttgtaatatcccagaggggagagagtgatattactccccatattgcagggacatacacccccctgtgatatggttcaaaatgtcttttttttttgaaggactggttctttatttcaaaaagacacttgtcaatattcattatcaaaacagttgcactattgatttctctttctcccaatcggccccaagtagaccacatcaaaggagagtacatattaagccaataagctgtaggatgtacacctaacagacctcctagaaaccttaccagaaaatggggacagggtagggaaagaaactttaaaagatcaacaaactgccagcccacggactgcaggggctgtcacagccagatggggtggccagggtgccacaaacccaaagaagcaaagtttcaaaataatataaaatttaaaaagttttgtacataagctattcaagatttctccagcactgactgatacaaagcacaatgagatggcacttgtagagacagcagcttcaaactcagaaaagggtaatgagatgagtttcacatggctaaatcagtggcaaaaacacaatcttctttctttctttctttctttcaaggaggcaagaaaagcaattaagtgctcacctcaacataaggggaacatgatccattctgtaagcagttgggagggggtagagatggaacaaaattttggtctcagaggtcttgccatcttaatttggtcacttctaatgaaaaaaataaaaaatagaaataacattatccaaaggtatcttaaagctgaaaacttgaacagcacattttttgttgttgttgtttggctaactcctcctggaaccacctttctggcttagctagtactttgtacagagcaatgaggcttcccatagtggagtctccctgggctctgtttggctctcagcaaggcaggcctataccttttcctctcctccatggagagaggaatatgcattaaggtgaaaaatcaccttccaaaagtgagaaagggattcgatcgctgcttcagggctgtggtattatatggaatgttttacaaaaggttgctacaaaacaacaaaagaggtaattacaaaatgtgtacatcacaacatactttttaaagacattatgcattgtgctcacattcccttaaatgttgtttccaaaggtgctcagcctctagcccagctggaatctccgggaagaggcggacagtttggtgaaaaagacacagggaaggagcgggcggcggaaggagggggcggcgaaaggagaaagcagccttccagttaaagatcagccctcaattaaaggtcagcttcgggcaggctggcctcaggcggagtctggttcagagggaggagcagcagcagggtgagactgaggcgttctacatctcattcaggtcaagcagagtctggtccagcatcctttgtgtacagaggtgctcccctttggtgcatttcagtttatcttccaagtcatcaattgtcttttccagcttggctaccgatctctcagcaaactcagcatgggtctccgcctcctttattttatcagtaagaatcttgatctcttcctcatatttgtcttctttttgagagtacttttcttcagcagcactcagacacttcaggttctggtccatcagtctaatctgctcatccatctctcggcaaagggattctgccagctcagctcgttcctctgtgcgttccaagtctccttcaatgatcaccaacttacgagccacctcttcatacttcctatctgcctcttctgcaatgtgcttagcttctctgagttggatttcctggagttccatcttttcttcatcttttaaggcccggttttcaataaccttcttacctctctcactctcatcagcagctttttccgcttcttccagcttttgcagggcagtagccaggtgctcctgagcacggtccagctcctcttcaaccagctggatcccacgttcaaggaggccacctcagcctcagcctgttcccgggcccacctttctccctcaacttctcgctggaggcgctcagctcgctcctctgcatcatctgcctgctgctgcagaacctggatcttgcgcttcaccgcctcgatggtggtgatcccagccatggtgcccacccagctactgctagagctccggttcctgcctcctccgatcggcgttgcagcctcctctcacccttacttccgcctcggttcaaaatatcttaagggaaggagttgatattactccccacatcacgggaagtttacatcccctggtgatatggtttgtaatatcccagggtggatagggtgatattactctccatatcgcgaaggagtactcccccctgtgatatggttcataatatccttggggggagagtgtgatattactccccatatcgcgagggccatatactcctttgtgacatggttcgaaatatcccggtgggggagggggtagagggtaatattactccccatacagcgaagagcatacgcccttctgtggcaaggttagtaatacttcagggaaaagagtgcaatattacttttcatattgcagggaacatacactcccctgtgacatggttcgtaatatcccgggggctgagagggtgatatttctccccatatcaccgggggcctacacctgggtgtgatatggctcataatatacagggagggagagggtgatattactccacataccgagtgaggggttacacaccctcgtgacatgttcgaaataccccaaggaggagacaatgatattactttccctgtcgcgggggctacaccctcccagtgatatggttcacaatatcccggggtggagagggtgatattactccctatatcaccggggggtgtacacttccctgggaaatggtttacagtatccccggggggagagggtactattactccccatatcacgttacatatcagggtacacccccacgtgatatggtttgtaacatcccaggaggaagaaaatgatattactccccatatcgcggtggcatacacccctccccgttaaatggttcataatatcttggggtggagagggtgatattactccccatatcacgtggggcatacaccccactatgatatggttcataatatcccggaggggagagggagatattactctccatgtcgcggggggcatatacacccctgtgatatggtttgtgatatcccgggggcggagagggagatattactctccatatcgtggggtcgtacacttttctgtgatatgattcgtaatatccagacggggagagggtgatattacttcccatattgcgggggcgtacacccctctgtgatatggttcataatatcccgaagaaaagagggtgatattactcctcatatcgcggggaacacacaccaccctgtgatatggtttgtaatattcagcgggggagagagtaatattactccctgtatctcggatggcgtacactcccctgtgatatggttcataatatccagaagaaaagagggtgatattactccccatattccagggaatgtacaccaccctttgaatatggttcgtaatatccaggaggggagagggtaatattgctcccaatatcgaaggaggtgttatacggttagtaatatccagagaaggagagggtgacattactccccacatcgtggtgggtgtgcacccacctgtgatatggttcataatattcaggttaagagaggtgatattgctttccatatcgccaagggtgtacactcccgtgaaatacagttcgtaatatccaaaaggggagagggtgatattactcccatatcgtggggggtgtacacccctctgtgatatggttcataatatccagggtggaataaggtggtattactccctgtatctcggggcatgtacatcgcctgtgatatgattcataatatccagaagaagagagggtgatattaatctccatattgctgggggtgtacaaccccctgttgtatggtttgttacactgagttggggagagggttacattactctcaatatcgagtggggcatacacacttatgtgatatggttcataatatcccagggaggagagggtgatattactccccatatcgcgggaggcatacaccccaatgtgatatggtttgtaatatctacatttttttttttgagacgaagtctcgctcttgtcccccaggctggagtatgatggccggatctcggctcactgcaacctcagcctcccgggttcaagcgattctcctgccttggtcccccaagaagttgggattacaggcgcacaccaccacgcccggctactttttgtatttttagtagagaaggggtttcaccatgttggccaggctggtctagaactcctgacctcagatgatccacctgcctcggcctcccaaagtgctgggattacaggcgtgagccactgcacctggcctggtttgtaatatctatgaagggggaaggtgatattactttccatatcacgggaggcgtacaccacgatgtgatatggtttgtaatatccagggggtatactgggtgatattactccccatatcgcggggagtgtatacccttttgtgatatggttcctaatattaagctgaggagaaggtaatattactccccatatcgcaggggtttttatatggttcataatattcaggaagagagagggtgacattactctccatatcacggggtgtgtactcccccatgtgatatggtttgtaatatccagggaaggagaggttaatattactccccatatcgcagggggtgtacacctctctgtggtttgtaatatccaaagggaagaggatgatattatcttcaatatcttggggggatacagtccccagtgatattgttcataatatccagagggggaggggatgatattactcccaatattgcaggtggtgtacaaccccctgtgatattctttataatatagagggggatgatgatattactcccaatatagtaaacaacctgtgtgtacaccccctgtgatattgtttataatatccaagggtggaaaggatgatattactcctcatatcgcagggggtgtatacccctctgtgacattgttcctaatattcaggggaggagaagatgatactactcctcatatcacaggggatgtacacccccctgtgatacttttggtaatatccaggggaggagaaaattatattattccccatgtcacagagggtgtacaccccgctgtgatagtgttcataatatccaggtgaaaagaggatgatattactccgaatatctcaggaagtgtacacccttctgtgatattgttcataatatccaaaggtggagaggaggatactactccccatatcgcagtgggtgtacacccccctgtgatatggttcataatatccaatgtaggagaggatgatattactttccatatcgcggagagtgtacatccccctgttatattgtttgtaatattcagggagaaagaggatactactactccccatatcacacggggtgtatattcccctgtgatatggttcctgatatccaagagatattataatcctctcttggattatgctacctctcatatcgcatggggtgtacacacactttgtgatatcgtttgtcatatccaaggagggagaggattatattaatcccaagatcacggggggtgtacaccctcctgtgatattgtttgtaatattaaggggggagaggataatattactcccaatataattaacaccctgtgtgtactcctccttgtaatattgttcataatatccaatgggggagacgatgatattactttcaatatcgcagaggatgtacatccctttgtaacaatgtttgtaatataaaaggcaagagaggatgatactacttccaaaattgcaggacatgtacaccccccggtgatattgttcctaatatccagtggggaagaggatgatagtagtcccaatatcgcaaagggtgtacacaccccctgggatattgttcctaatataaaaggaggagaggatgctattattcccaatatcacagaaggtgtaaaatcccctgtgatattgttcgtaatattcaggaggggagaggattatattactcccaatatcacagggtgtgtacacagggaggggcaagggccagaagcgggcgggaatccccatgtttgggcggacccagtttctaatggccagcatttgccaatcaaagcttaccagagaactctaaaagccagggctttcctgctagacaagactcatttctggaactgctttaaaaagaaacaaaacttcccaaggaccccttttcctctctgtctgcctaaaataatgttttaaaaactcctaaagcagctgaattcagcccccttcctgggggaatgtatagacggaactcccacctttcccggcatcccaaggccagagtatgtgaaactcctgggtctctatgtgtgtctgagcggctgctctgccaacactccacacagccctgtgtcctggacccaaggcccttatgacctgagctcaagaggggatctcctgatccatgggttgcaaagatccatgggagaagcatggtttctggggcggggtcacacgctcagtcactgtttccctcggatgccggagatggttcctttggctctctgccaatacagggtgaatcatcatccatccctcttttctttgttctcccgggtcaagttgtttgcctagtcagtcccaatgtgagaacctgaatatttcagttgacgcgctgacttcaaaatccccgggcttcgggaggcggagcttgcagtgagccgagatcccgccactgcactccagcctgggcgacagagcgagactccgtctcaaaaaaaaaaaaaaaaaaaaaaaaaaaaaagtccccgggcttttcttttcactcagtggaaggcagctgcttctaattggccatcttggcccgcccccaccacgtgaccttctgtaaaatgcctccactctccaggaacgctctcattatataactttgcctgaaaccaacagcacgctcattgcacatatcatgggctcatttatttcacttataaagaacctggccaaggaagagatagtgcctaaagtggccagtattctgaccgatatgttagaaaaatggtgtgccgaccaattcatgacatgtgtcccaaaactagcaacggaaattgtattcgccgtgttgaggtctctaatccagatgatgctcatctatgtactggaaaaggcagagtcctttcctgacaagctgctgaaactcttcagaaacatctcatatttcctgaagaagatgatgtctggacaagcagcacaggtcgttcagatttaactttctattcatatatccagcacgatattcgcacaattgtcacgaaaccttaccagttgatgagtcctgcacatttcctttaatttcaggaggaagagggtaatccggatgagttttctgacctactctgctgctgtgattaaacaaccaccaggaaattttgacgacactgttctcctgagctcctccctttcctccgggaacaaaacaattgaatttacaaaaataaagtgttatttgactggagtgaggtctcatgtctgcttatgcggtggctcgctgctcagaacagggtgagtctctgggttgtgtgctgaggaggggaggctctcaatctggagaaaacccactgcaggggacacctccatggggtctgagggactgaggatgaggagccggactgggtctagggaaggaggaggtttcagagggtgaaattctggcactaaagcctgggggtgtttgggaacttcctccttccgaagaagtttcagggagggataaagacaaaccctgggctccttgaggggcccttactaatttgagaggactctatcgggaaggagagtgacaatggcctccttgaggactgaggcccctgaataaatgaggcccagatacagtccatgggggatgagaccttcaagggtcacattttggttgggacagaggaaaagtgcagctctgcagccgcagaggaaaacccggcagtgtgaaagcgaccttggaggggccctgtgcgctctgaatgcgtctgagcccccatcccctgtccccgcctctctttctggattcttccagctcggctgtctccgccatcttctgagcgctccaccctgacttattcaagtttcccttctgccttccaagtactccaaaatctttcagatctgtgtccctacccctgtttttagcatgtgttggggctccaggtccctgaaggtttctggcctgaaatccacctccccagcggagtggactgcgttctagagactccacactccgcgaggttcccaggcccctgagggacaaccgagtggcctgcgcacttcagggctccacactcggcaaggtctttcaagcccttggggtccccttcttagttttttccacctttctgggctgcagtcactccataaatgctgggatctgatccccacccccactctcgtttcctcaattctgcgggctacacgctctggcaaggtcctccgggccctggatcccctccctctccctatgcccacgctcctagtcagcccttctggggtccactattttcaggaactaaccgttctcatggagccttgctaaccggaaagctgtgtggaagaaaggctttgaggatagaggtggagatttggctcttccatagtgccactcacccaccccaccatgctgccactgccagacccggacccctgtttcagaacaagtgaccagattcgctcctggacagccctggacactggccttttctctgaaaactactcaccctttctctagtccccacttcatgccagcctcataccctcttccttcccccacgctggcttccgggatcctcctctgctcagacaacctcttctgtgtcccacccccgtttttagaatgctttggggcaccaggttgggggaaggtttctggcctgatatccatctctttccaaactcccttcttcccttgaaaggcttcttgccttcagccccacttctggctccgaggtttcaggacaccctcctcttcatcctcattcttttgaccaccagctttttaggaattcgaacgtccctctcatcttcgtgaatcctgtccaggcatttgttgaccccttcatctgatacccctgacctcacattgccaaaagtctacccctacccagtacactggaattagacaaaatcccaggagttttacctcaactctgagtgtgcccacaggagctctccctgaagccacgtccttttaagcagggtctagggttcctcccttgtcttaatgaactctttgtcacacggaggacgttatggagcccttatgatctttcactgcctttctgcccagcgttttgtctttccatggacatttataatattttccatggacattttgttctctcaatgtccacccctaatttccaacatcccaaagattctcatgtgtttcctgaaagccatttacaggaatggctgtgcccagacccccttccccaggatcctccttcacacctggtaggtgcctctcctagagagatttgcactcagttgtcgtgcagtcacatggcccagatggttgttaatcacccccttcctggcaacagctagcagccagggaatcactggcacagaaacctcagggtgaccaagatgaggccacctctgtgctgaaggctgtgctccagagcctgcttgggatcaggcttaagcaggtcttcagccagacctgatgttacctggtttccttgagctgccctgcctgagctatcgggagcactccctcaatgcacatcttgattccctatctcatgctctgcttctagaaaccatgagctatcaattgctactggcaatggtcctgggaagtcaaccctaagtatggattctggggttggatgactccccacaggacttcagtgagcaacaatcactgctggcagttggaggacagagtcgctagggcatgtgaccactgtgaaaccaccgatgtttcacctggggtaattttggatgaactacggtagaagcactgaaggtacattgcttttggtttggaagattgtaggtaaataatagcgatatgaatgtggaattggatggctgcaaacgagtgccattgatgcattgaaagaggaaaagtcaggctgtcacctgtcactcagcaatttaaagtgtgagagttgggactagatgtggtggctcacatctataatccagagattcgggggaagcttgaagaggtaggatcttttgagtccaggagttccagaccagcctggacaccagagcaagacctcatctctacaacaaaattttcttaaaaattagatgggcttggtggcacgcacctgtacttgtagatctagctaatggggagcatgagataaaaaaatcacctgagtcagggacttaggggttacaatgaggtatgattgtgccagtgcacacactcccacctggccaacagagtgagattctgcttccaaaaaaataagaaataaatcaggtttgagagttggaaagcatcatcttctcctagagccaaaggacatgtacaactgagacccaggaacaaagcttcatcacaaagagaccatcatcagtggagccgggagatgcattccccctcaccctgccttgaggaggcagtggagtcatctgtctgggatcctttctgacccagccctatttgtttgtctctttggcttctttggatttgtatattttagctgttataacactgtaaaacaaacagagtgatttttttgagttgtgtgaatgatgctagctccatagtcaccctgagagtgatgggaacttttgaatttgtggcaagttggagggtagtgtaagtgacctgagattgccaaattggggctagcactggatgtgaggttaggctagtggaaaaatatgcccagaaccagaggagtgtgggctcactgcaggtggttaggctcagatccaaattgtacagatggatagctttggggtaaagaataacatagttgagaagtgcatgtgttagtctgttcatgcactgctataaagaattacctgagactgggtaattatttataaaactcaggtttaattgggtcatggttccacaggctgtacaaaaagtatgatgctggccatcagctcaacttctggggaggccccagaatagttagagtcatggcaaaaagtacaagggaagcaggctcatcttccacggccagagctggagcaagtggtaggagaggtgatacacactttcaaacaagtaggtcttttgagaactccatcaccggacagcacctatgggatggtgctaaattattcatgaaatatccgcctccataatccactcaactgtcaccagcgcagccagccccacctccaacagtggggattacaattccatatgaggtgtgggtggggacacagctccaacctcaatcagtgggcatcctggattgggtctactatagaaggagaaccaggagctgactatgatcttgaaccctacccatgatggccgggcggggtgactcatgcctgtaaccccagcactttgggaggctgaggtgggtggatcgcctgaagtcaggagttagagaccagcctggccaacatggtgaaaacctgtctctactaaaaatacaaaaaattagaccggcgttgtgctggatgcctgtaatcacaccactacgctccagcatgggaaaaaataccaaaacttcgtctcaaaaaaaaaaaaaaaaaaaaaaaaaaaaagactgcccatgaccactgcaccagtgagagggacaccagcatcactgagatgcaagggctggacattcttcataggtcagagctcaaagcaggggacactgatacagagatgggctccatccatagcaccaaagtggtgagaggatgtgggaatggcagaggccagcactttgccatcaatgcaagggggtataaggaggtgacaccagtgccagagtacatcacggggggactgccctacaatatctaggacttacctcttagagcgtgtttcattagcgacaacagatataaatggcagacaggtgtgtccctgcattaacaggaaatagaaatcatcaagaggaacagaaggcagatgtcagcagccccttagaaagtcatcatccttcatacagttaaaatctgagacagttctcacacgagaaggcctaactcaaaaagaggctgggttctcatgaggcaggtttatgcaaaaccaaggaaggtgtacaagtttggaattctccagtttcccttggaaaagacctacagtcatttgcttaggtaactgagcactgaacaaaggtgagtattgttgtcttttagaagctcttggccaagaaggccttgttggcataaaacccatggtttggaaacatcaccatgacccctgttagagtaatggcctaagggtgggggtcaggaaattgatgtattccttgccaacttctgcctctaagtgagtgaactctgtttgtgaacctctctcctctgtggttatgttcctaggctctcatgtataatcaggagtcatagacttagaaacaggaaaaatacttacagtgtttttgtggcctgtgagctatgacttataattttaggaaaaaaacaattgcaaatggaaagcctaagtctatcaatgctcatccaagacaacataatcaataaaaaccaatatcaaatctcaaggcaaattatttcctgtatatagatggcagagatgagcaccaccatcaaaaactcaaggaccagtgctgtgggtccagtcatctgtttcatggaattcaccagtctggtatcttcaaaatccagaaggatgatggcagatggcaggaaagtaatgcaaacgtcatcaggtgtgaccccactgtagcagctgtgatggatgttttctctcaccatagcaataaataacacaacctcggtcacactgtatgcattgttggtctgcaaaatccatgttttgcaaaactcttcaggaaggtggatctgtaatattggcattgacatgagaacaacagcagtatttattcacaatctcaagctctctgtcttcccgtctctctcattagccatccaagtagtcctgaggaaccaagcccatcagaacattctgcaacataatacacagctccattctccattcaaattttgttgttgttgttgttgttgatgagacaacatcttactccatcagccaggctgacgtacagtggggctatctgggctgactgtagtcttgagcttccaggctcaaggcatcctctcacctcagcctcctaagtggcttgaactacagacacacagcgacatgctgggctagtttttgtatattttgtagagacgtgctctcaccatgttattcaggctggactcaaactcctgagcgtaagtgatccaagcaccttggcctcaaagtgctgagattacaagcctgagccactgcacccagcccaatctccattctactgataacaatgtcattaccaggtctgatggacaggaaatggtaaggtttctgaaaacctaaggatcacacagcgagttccaaaggctgaaagtgcatacctgtcgacactgataccaatgacatccaatggtgagaatgacattccttgtagtcctagctctgctcataacaaatctatactgaagtgtaagagtttgatggtcatggggattttccatgtctctgcctttcagcgatgtgccatatctgtgaagtgttcagaaatgcaacagcctgaggcatgctgggcatatcctctaataaaaaggaaaatgccattttatggtcctgtatttctacaagttggaacacatgggcctgtgatccagatgggggaaatgggaatattcccactcattcaccttcatccacgaagcccatttgaaagctttgggcttcccatccttgtagattttagtgttgtgggctgggtgcagtggctttcacctgtactgccaacactttgggaggcctagacaggtgaatccactgaggccaaaagttcgagaccagcctggccaagatggtgaaaccccgtccctactaaaaatacaaaaattagcaaggtattggggccagcacctgtaatcccagctgctcgggaggctgaggctggagaatcgcttgaacccaaaaggcagagactgcagtgacccgatcctgcctttgcactccacctgggcaagcagaacaaaacttctgtcttgaaaaaaaaaacaaaaaacgaacaaaaaagatgttagagttctgggtttagaggtctataccccagaaagagaatggtttcaacaagggacaaagaagttgctttaaacgttgacttgccatttcttttcagtgtgtttgttctcttgcgtcaagagaccaccagaaaagtggtgcaattactctcctgtcaagaatcattgactatcatctgcaagagggtcagatcctggtatataattagggcagaaatacttagtctgagaagggtatgacatccagaggccctattaatgatgtccttttctccatgcctgactctgaccccatgtgctggactgcccctgtgtggatggcctcatggcctgctcggactctgaggtcccaccccaagtggcacctccatggagggctctactcttgtatgggctctgacactcacactgagacactctcccatggacacctcttcacccacttggggtctgaaactgggctactccatccctccctaacctggaacagagagctttcactgctattacacaagtcatagaggctaactcctcatttttccaagctaattattgaaacattagtcctgggttgataagacaagataagttaacttttcataaatttgcttatcaagttttgaataaattcaaataaattcaccttccccacacaccttagttgtcgacatcacacgcgcacccatactcacagggtgagcacgaaggcttcactgtcagtggagaaagtggcaaaacccttctgtgcctcatcctggtctagacctggccctcatcctttcccactcttcccctcactcccttggattcatccacactggcctcctgcctgctgctccacctccctgcgaagctcacccctgcctcagggcctttgcacgtgcagtggcttcaagccatatcctcttcacccagatctcccagatctcctgaatgatcttcttttatcattcaggtctcagcttgcatgtaatcttctcagtgaggattacccaaaccacatagttcattcattcattcaaatattcattcaatggcatattgacaaagcagctacttcatgccaggccttgggccaggtgttatggatatggcaacaaacaaaacaagagttttctgctctcaaatttttacccacttaaaggagatatcatacatcatctgtaaataaatacatcatctgtaaataatgatgtaaataaatacatcatctgtaaatctgtaaataatgatgtaaataaatacatcatctgtaaataaataaagtataataaaagaaaatagtaggtttttttggttggaggtgaccgtgaagtttgcaaataccatcttacaacacattattttattttatttcatttcatttttaattttattattattatactttaagttttagggtacatgtgcacaacgtgcagatttgttacatatgtatacatgtgtgaagttggtgtgctgcacccattaactcgtcatttagcattaggtatatctcctaatgctatccttcccccctcccccaccccacaacagtccccggtgtgtgatgttccccttcctgtgtccatgtgttctcattgttcagttcccccctatgagtgagaacatgcggtatttggttttttgtccttgtgatagtttgctgagaatgatggtttccagcttcatccatgtccctacaaaggacacgaactcatcattttttatggctgcatagtattccatggtgtatatgtgccacattttcttcatccagtctatcattgttggatatttgggttggttccaagtctttgctattgtgaagagtgccgcaataaacatacgtgtgcgtgtgtctttatagcagcatgatttataatcctttgggtatatacccagtaatgggatggctgggtcaaatggtatttctagctctagatcactgaggaatcgccacactgacttccacagtggttgaactagtttacagtcccaccaacagtgtaaaagtgttcctatttctccacatcctctccagcacctgttgtttcctgactttttaatgatcgccattctaactggtgtgagatggtatctcactgtggctttgatttgcatttctctgatggccagtgatgatgagcatttcttcatgtgttttttggctgcataaatgtcttcttttgagaaatgtctgttcatatccttcacccactttttgatggggttgtttgtttttttcttgtaaatttgtttgagttcattgtagattctggatattagccctttgtcagatgagtaggttgtgaaaattttctcccattctgcaggttacctgttcactctgatggtagtttcttttgctgtgcagaagctctttagtttaattagatcccatttgtcaattttggcttttgttgccattgcttttggtgttttagacatgaagtccttgcccgtgcctatgacctgaatggaaatgcctgggttttcttctagggtttttatggtttgaggtctaacatgtaagtctttaatccatcttgaattaatttttgtataaggtgtaaggaagggatccagtttcacctttctacatatggctagcctgttttcccagaaccatttattaaatagggaatcctttccccacttcttgtttttgtcaggtgtgtcaaagatcagatagttgtagatatgtgacattatttctgaggactctgttctgttgcattggtctatatctctgttttggtaccagtaccatgctgttttggttactgtagccttgtagtatagtttgaagtcaggtagcatgatgcctccagctttgctcttttggcttaggattgactttgcaatgcggggtcttttttggttccatgtgaactttaaagtagttttttccaattctgtgaagaaagtcattggtagcttgatggggatggcattgaatctataaattaccttgggcagtatggccattttcacgatattgattcttcctacccatgagcatggaatgttcttccatttgtttgtatcctcttttatttcattgagcagtggttttagttctccttgaagaggtccttcacatcccttgtaagttgggttcctaggtattttattccctttgaagcaattgtgaatgggagttcactcatgatttggctctctgtttgtctgttattggtgtataagaatgcttgtgatttttgtacattgattttgtatcctgagactttgctgaagttgcttatcagcttaaggagattttgggctgagacaatgggttttctagatatacaatcatgtcgtctgcaaacagggacaatttgacttcctcttttcctaattgaataccctttatttccttctcctgcctaattgccctggccagaacttccaacactatgttgaataggagtggtgagagagggcatccctgtcttgtgccagttttcaaagggaatgcttccagtttttgcccattcagtatgatattggctgtgggtttgtcatagatagctcttattattttgagatatgtcccatcaatacctaattattgagagttttcagcatgaagggttgttgaattttgtcaaaggccttttctgcatctattgagataatcatgtggtttttgtctttgggtctgtttatatgctggattacatttattgatttgcatatattgaaccagccttgcatcccagggatgaagcccacttgatcatggtggataagctttttgatgtgctgctggattcggtttgccagtattttactgaggacttttgcatcaatgttcatcaaggatattggtctaaaattctcttttttggttgtgtctctgcctggctttggtatcaggatgatgctggcctcataaaatgagttagggaggattccctctttttctattgattggaatagtttcaggaggaatggtaccagttcctccttgtacctctggtagaattgggctgtgaatccatctggtcctggactgtttttggttggtaagctattgattattgccacaatttcagatcctgttattgctctattcagagattcaacttcttcctggtttagtcttgggaaggtgtatgtgtccaggaatttatccatttcttctagattttctagtttatttgcgtagaggtgtttgtagtattctctgatggtagtttgtatttctgtgggatcagtggtgatatcacctttatcattttttattgcatctatttgattcttctctctttttttctttattagtcttgctaccggtctatcaattttgttgatccttttaaaaaaccagctcctggattcattaattttttgaagggttttttgtgtctctatttccttcagttctgctctgattttagttatttcttgccttctgctagcttttgaatgtgtttgctcttgcttttctagttcttttaattgtgatgttagggtgtcaattttggatctttcctgctttctcttgtgggcatttagtgttataaatttccctctacacactgctttgaatgtgtcccagagattgtggtatgttgtgtcttttttctcgttggtttcaaagaacatctttatttctgccttcattttgttatgtacccagtagtcattcaggagcaggttgttcagtttccatgtagttgagcggttttgagtgagtttcttaatcctgagttctagtttgattgcactgtggtctgagagacagtttgttataatttctgttcttttacatttgctgaggagagctttacttccaagtatgtggtcaattttggaataggtgtggtgtgatgctgaaaaaaatgtatattctgttgatttggggtggagagttctgtagatgtctattaggtccgcttggtgcagagctgagttcaaatcctgggtatccttgttaactttctgtctcattgatctgtctaatgttgacagtggggtgttaaagtctcccattattattgtgtgggagtctaagtctctttgtaggtcactcaggacttgctttatgaatctgggtgctcctgtattgggtgcatatatatttaggatagttagctcttcttgttgaattgatccctttaccattatgtaatggccttttttgtctcttacgatatttgttggtttaaagcctgttttatcagagactaggattgcaacacctgcctttttttgttttccattttcttggtagatcttcctccatccctttattttgagcttatgtgtgtctctgcacgtgagatgggtttcctgaatacagcacactgatgggtcttgactctttatccaatttgccagtctgtgtcttttaattggagcatttagcccatttacatttaaggttaatattgttatgtgtgaatttgatcctgtcgttatgatgttagctggttattttgctcattggttgatgcggtttcttcctagccttgatggtctttacaatttggcatgtttttgcagtggctggtactgactgttcctttccatgtttagcgcttccttcaggagctcttttagggcaggtctggtggtgacaaaatccctcagcatttgcttgtctgtaaaggattttatttctccttcacttatgaagcttagtttggctggatatgaaattctgggttgaaaattcttttctttaagaatgttgaatattggcccccactgtcttctggcttctagagtttctgccaagagatcagccgttagtctgatgggcttccctttgtgggtaacccgacctttctctctggctgcccttaacattttttccttcatttcaactttggtgaatctgacaattatgtgtcttggagttgctcttcttgaggagtatctttgtggcattctctgtatttcctgaatttgaatgttggcctgccttgctaggttgcagaagttctcctgggtaatatcctgaagagtgttttccagcttggttccattctccccatcactttcaggtacactaatcaaacgtagatttaatcttttcacatagttccatatttcttggaggctttgtttgtttctttttactctctttcctctaaacttctcttctcacttcatttcattaatttgatcttcattcacttatatactttcttccacttcatcaaatcggctactgaaggtattgcatgcatcatgtagttctcatgccatggttttcagctctatcaggtcatttaaggtcttctgtacattgttttctctacttagccattcgtctaatcttttttcaaggtttttagcttccttgtgatgggtttgaacatcccctttagctcagagatgtttgttattactgaccttctgaagcctgcttctgtcaacttgtcaaagtcattctccatccagctttgttccattgctggtgaggagctgcgatcctttggaggagaagaggtgctctggtttatagaattttcagcttttctgctctggtttctccccatctttgtggttttatctacctttggtctttgataatggtgacctagagatggggttttggtgtggatgtcctttttgttgatgttgatgctgttcctttctgtttgttagttttccttcgaacagtcaggttcctcagctgcaggtctgttggagtttgccggaggtccactccagaccctgtttgcctgggtatcaccagcggaggctgcagaatagcaaatattgcacaacagcaaatattgctgcctgatccttcctctggaagcttcgtctcaaaggggtgcctggctgtatgaggtgtcagttggcccctactgggaggtgtctcccagttaggctagatgggggttagggacccacttgagaaggcagcctgtccattcacagagctcaaacactatgctaggagagccactgctctcttcagtgctgtcagatggggatgtttaagtctgcagaaatttctgctgccttttattcagctatgccctgcccctacagatggagtctacagaggcaggcaggcctcattgagctgcggtgggctcctcccagttcgagcttccagaccactttgtttacctactgaagcctcagaaatggtgaacacccctcccccacccagtctgccgccttgcagttccatctcagactgctgtgctagcagtgagcgaggctccatgggcgtgggacccactgagccaggcacaggatataatctcctggtgtgccatttgctaagaccattggaaaagcacagtattaaggtgggagtgtcccaattttcccagtacagtctgtcacgggttccctcatctaggaaaggtaaatcccctaaccccttgtgcttcccggtgacgcaatgccccaccctgcttcagctagccctccatgggctgcatccactgtccaaccagcccaatgagatgaacaaggtacctcagttggaaatgcagaaatcacccatcttctgtgtggatcaggctgggagctgcagaccggagttgctcctattcggccatcttggaatggcaatctatgtttgctttttacatttgaaaaaactggtgtcacgtacctaggtattaatcattgtggtatcctcttgccgatttacctctttatcattaactagtgaccctccttgtcttttgttgttacagtctgtgattttagtctattttatctaatatgagaatagctactctggcacttttttggtttccagcttcatgaaatatccttttccatttccctgttttcatttccctttcggtgtctctatagatgaagttgatttctttaaggcaccataagttgggtcttatttctttatccatttgaccatttagagaatttagaacactgtcagtgttattattcataagtaaaaacttaagagtgggtgtagtggtgtacatctgtatttcctgcactttgagagactgaggcgagctgatctcctggggtcaggagtttgagaccggcctggtcaacatgatgaaaccctgtctctactaaaaatacaaaaattagccaagcatgctggcatgtgcctgtaatccaatttacttgggaggctgaggcaggagaagcttgaacctgggagacaaatgttgcagtgagctgagatcacacagagaagtcatctccactctcctcatcagaacctcttgttcacagcatttgtgagcacaaatcaatgatggttattctttcctactaattagggatattttattacacagcaatagcctccagcaaagggaaccatcatacatgattcctacaagttgacagggctggaattatcactgaaaaactaaggtggctatacttgattcccaatgtccaatttttcatgaatagagaaatttatcctttttccccccagccagaaaccaagttttgctcttacgcccaggctggaatcaagtggcacaatctcagctcactgcaacctctgccccccagcttcaagaaattcaccttttgaacaaggagatattaaggatacactatgtgtatgctaccggtggttgcaggagactcagaaaagagagaaacagtcactggcctcgtgcaactgatattctcgggaggagagaaaggcaatcaagaaagaaacatgctgtatttcagacagctgtaagtcctccacaagaaaagaaagcaggtgaggaacataggaaatgtgtcaaccataaggttcccgctaattctataagttggtcagggatatcctccaagaataagcagcatctgagcaatcacctgaagggaggaaggaaggaagactgtgagtggtggcttacacctgtaatcccagcactttgggaggccaaggagggcagattgcctgagctcaggagttcacgaccactcagagcaacctgttgatacccaatctctactaaaaacacacaaaaaaattacccgggtgtggtggcacgcacctgtagtcccagcttccatgcccagctgatttctctctctccatatatatatatatatacacatatattgtttttgcagagatagggtctcactgtgtcacccagtcatcaagcaattctcttatactgttttggaaaagcatgggaattacaggtgtgaaataccctgctggtcctgaaaaatgtgatatttgggattctctgcctggcttgttttacccaaaataatgacctccagttccttccaggttgctgcaaaagacatgattttcactgttttataactgaatagtattcctgtatgtatacataccacattttctttatttattcttctgttgattgacatgtagggtgattccatgtctttgctactgtaaataatgctgcagcaaatatttgtgtgcattttgatctattcctttgagtaggtacccagtactgcaactgcaggactgagtagttgttatattttttgttctttcagaaatctccatagtgtttgccataaaatctgcactaatttacattcccaacaacaatgcataagatttccccttttctccacattctcactaacatttgttatgtttttgtctttttcataatacccattctgactggagtaagatatctcattgtggtggttgttgatatttttgagacggggtctcactctgttgccagactggagtgcagtggtgtgatcgtggcttgctgcaacctccacctcccgggttcaagcaattctcctgcctcagcctcccgagtagctgggactacaggcgcgtgccaacaggcctggctcattttttgtatttttagtaaagacagggtttcaccatgttggccaggatgatcacagtctcttgagctcatcatacacctgcctcagcctcccaaagtgttggaattacagtcatgaggcagcgcacccaacctcaatgtggttttaatgaccatttctctgacgattcatggtgtggagaatttctttgaaataccttttggccatttatatgtgctcttttaaaaactgactcctgtccaggtgcggttgagcatgcctgtaaccccagaacttcgggaggctgaggccaatggatcacttgaggcaaagaggcagaaatcagcctggccaacaaggcaaaaccccatctttactaaaaatacaaaaaatcagccacgggctgtgactcgtgcctgtggtgcaagttactcaggaggttaaggcacaggaattgcttgaacccggtaggcacaggtcacagtgagccaagatcatggcactgcactacagcatgggtaatagagaaagacctgtctcataaaaacaaatgaataaataaataagataaaaaataaaaaagtctctttatgtcctttgccgactttttaatgggattctttggagttttctgttgtagttgagatctttgtttactctcggtattagtcttttgtcaaaggaaaagtttacaaataatttcttccgttctgcagtttgtctgctcactctgttgagaggattatttctttggctgtgcagcagctttttgtttcagtaaagcttttgaatttatataattaaaattttcagtttggtttaaatttgcactggtcgatttttggttttgttgcctgtacttttgaagtcatactcttgaactctttactagacaataaccagaagagttttctctagttttcttctcacatttttattatttcagtacatatatttaagtctataattcatcttcaattgatttttgtagaaatagtgagaaataggagtccaggtttattcttctgcaaatgacaattcaattgttccagcaccaattattgaaaagggtgtgctttcctcaacgtatattcttatcagctttgtcaaagatcagttggctataaatgtgtggctttctttctgggctctctagtctgttacatcaatctgtgtgtctatctgtatactactaccatgctgtattggtgatgatggctttgtaatataatttgaagtcaagaaatgtgatgctcccagctttgtttatttgcttcagaaaggctgagtcaacagctgcagagatgaagctgcccctcctcgcagggctccttcccggaaaaagatcatggctcccactgaccatataaccatggctggaactcctgaaattcccaaagggaggccctacccagtgaggggggatgaatgaaggtcctacttaaggaatctgtctggccacaatcaggcacagcagctgtgctgccttgtgggggaccagaccacctggattccctggagcctgcaggctagaatgtctgagtccatggaaacacagaaatggaggccgccctcacctccccagaaaactgtagtctcaggcagtctccagccgattgccactggttggctgctattccaagccagtgggtcttaacttgagaggtgctgtggaagtggggcccacggaatgaggctgcttggctccctggattcagccccttttctaagggaatgtacagatggaactcccgccttgcccagctttccaagtatataaaactcctgagtctctgtgagtgtctgagcgagtgctctggcaacattcgacacggctctgtgtatctgacccaagacccttatggcatgagctaatgggaggatcttctgatccatgcgtggcaaagatgcatgggagaaacatggtttgtgggtaggggttgtgcattcactactgcttctcttggctgtaggtgaaggtttctttggctctgtgctgatactgggtgcaccatcacccaccccctttgtttcttctcctgggtcaagtcatttgcctaatcagtcccaatgtaggaacctggatacttcagttcaaggtgctgaattcaccgtgcttttcattcaggggaagacagctgcttctcattgggcatcttggcctgcccacttcacgtcactttttgtaaaatccacaccactccaggaatatccattacttaacttcgcctgaaataaacagaaggctcattacacttatcatgggctcacttacttcgcctataatgaaggtgccatggaaatgctagtggatgacgtggtccattttcttagggatgagatagaaaaatggtgtatggctttttaatttaattaaaatttttagtttggtttaaatttacattggtctctttttggttttgttgcctgtacttttgaagtcttactcgtgaactctttactggacaatgaccagaagagttttccctaagtttcttctgatattttgaccatttcagtacatacatttcagtctataattcactttaaattgatttttgtaaacatggtaagaaataggagttcagatttattcttccgcatatgataatgcaactgtcccagtaccaattattgaaaagggtgtgctttccctagtgtatattcttgtcagctttgtcaaagatcagttgcctatgaatgtgtggctttcattttggattctctcgtctgttacatcaatctgtgtgtccacatttatacctgtaccatgctgtattggtgactatggctgtgtaatatattttagagttaggaaatgtgatgctcccagctttgttcatttgcttcagctgaaaaggttgagtccacaattacaaagatggcagccgcccatccccggaggacctccaacccagaaagagatcaggcttcccaccaaccctataaccctggctggagttcctgaaattccaacagggaggaccttcccagtgaggagggatgaatcaaggtcaaatttaaagaaacagtctggccactatcaggcacagcagcagtgctgccttgtgggggacccctcctgctccagaccagctgccctccctggagcccgaaggctagattgtctgagtctacggaaacagagacggtggccgccccaaccacccagaactcggtagtctcaggcacttggcttgctatcttgccactgcttggctggtattccaagcccgtgggacttgagaagtgctgtgatgatggggaccacaggatgaggctgtctggctccctgtgatatggctgtgatgagtggaggaacaccagggctcatgtctcacacagaattggagaaaatgacacaaacacatgtacagtggttttatggcgtgcagtttaataggcaagaacgaaggaagagctccccatactgagacagagggaggggggctccaaagccaaaagaggaaacccggagtgctgtggataccaatgagttatatgaagaaactggagggggcggtgtctgatttgcatagggttcaggcgattggttcgaccaggcatgtcatttatgtggcccacggaaaaactggccctcccacctagcctttgaatatgcacgtgccggacaccctgatttcctacactcatggggatatatgggggtggccatatcgccaggcacaggtggggacaagggccagaagagggcgggaatcgctatgtttgggtggacccagtttctaatggccggcatctgcagatcaaggttaccggagaactctaaaagccggggctttcctgctagacaagactcatttctggagctgctttaaaaagaaacaaaacttcccaaggaccccttttcctccctgtctgcccaaaataatttcttaacaactcgtataacacctgaattcagcccccttactgggggaatgtaccaacggaactcccacctttcctggtttctcaaggctagattgtgtaaacctcctgggtctcggtctgtgtctgagcagctgctctgccaacactccacacagccctgtgtactaggcccaaggccgccgtgactcagcccatgggaggatctcctgatttcttggttgcaaagatccatgggagaaaaatggtttctggggcggggtcacacactcatggcttctcttggctgtgcaagaaggttcctttggctctgttccaatatagcgtggttcatcacccacccctgttttctttgttctcctgagtcaagttgtttgcctagtcagtcccaatgtgagaacctgaatatttcagttcacgtgcttatcgtgaaattcactgagactttaattcagtggaaggcagcctcttctaattggccatcttggcccgccccctccacgtcacctcccataaaatggccacgctctccagggacgatgccattatatatctttacgtgaaaccgacagaacacttattacactttttgtgagctcatttacttcacttataatgaacatggccatggaaatgctagtggagaaagtggtcgattttctgatggatgtgataaaaaaatggtttgccgaccaattaatgacatatgtctcaaaactagtaacgagacccttaatcgctgggttgaagtttctaatcaagaagatgctcatctatgtattcaacaaagcagcttcccttgcttctgaaatgcttccaaacaacatctcatatttcctgaagaagataatgcctggacaagcagcacaagtcattcaggtttactttcagctcataaatccagcaggatattcgcacaattgttgggaaaccttatcagttcatgagtcgtgcatgtttcctttaatttcaggaggaagagggtaatctggaagagtttcctgacctactctgctgctgtgattaaacaaccaccaggaaattttgatgacactgttctcctgagctcctccctttcctcggggaagaaaagcattgaaactacaaaaataaagtgttatttggctggagtgaggtctcatgtctgcttatgcggtggctcgctgctcagaacagggtgagtctctgagttgtacgctgaggaggggaggctgtcaatctagaaaaaacccattgcatgggacacctccatggggtctggggggctgaggatgaggagctggactggatctagggaaggaggaggtttcagagggtgaaattctggcagtaaatcctgggggtgtttgaaaacttcctccctcagaaggagaagactcagggaggaataaggacaaaccatgggtcccttgaggggcatttactaacttaagaggactttatcgggaagcagagtgacaatggcctccttgaggactgaggcccctggataaatgaggcccagatccagatccagtccatgggagatgagaccttcaagggacatatttttgttgggacagaggaaaagtgcagctctgcagctgcagaggaagccttggcagtgtgaaagcgaccttggagggggccctgtgcgttctgaatgcttctgaggtccatcccctgtccccgcctctttttctggattttttgggctccatggtctccgccatcttctgagcgctccacgctgccaccttcagttttctcttctgggctccaaatactccaaaatctttcatatctgtgcccctacccctgtttttagcatgtgttgggactccaggtccctgaaggtttctggcctgaaatccacctccccagcggtgtggattctgctctagagaccccgcacttggcaaggttcccaggcccctgggggacaaccgagtggtatgtgcacttcagggctccacactcggcaaggtctttcaagcccttggggttccctcctcagttttcttcacatgtctgggatgtagtcactctataaatgccgggatgtgatccccaccccagtgattttttttagttccatgagtgttgctatctgaatagtcatcctgagagtgatgggaccttttgaatttgcagcaagttttagattagtgtgagtggcctgagatcgcaaaactggggctagcattggatgtgaggttaggctggtggaaaaatttgcccagaacctgaggagtgtgggctcactgcaggtggttaggatcagcacagaattgcaaggatgtatagctttggggtaaagaataacatggttcagaagtacatgtattagtcttttcatgcattgctataaagaattacctgagactgggtaattaattataaaaactcaggtttaattggctcatggttccacaggctgtacaaaaaggatgatgctggccatcagctcaacttctggggaggcgtcagaaaacttagagtcatggcaaaaagcacaagggaatcaggctcatcctccatggccagagctggagctagtggtaggagaggtgctgcacacttttgaacaatcagatctttttagaactctatcaccagacagcacctagaggatggtgctaaattattcatgaaatatccacccatatgatccactcaattctcaccggcccaaccaggaccacctccaccattggggattacaattacacatgagatgtgggtggggacacagatccaaactcgatcagtgggcatcttggactgggtctactatagaagaagaaccaggagctgactatcatccttaagactgcccatgatggccaggcagggtggctcatgcctgtaatcccagcactttgggaagccaaggtgggtgaatcccctgaggtcaggagtttgagaccagcctcgccaacatggtgaaaccctgcctctactaaaaacacaaaaaattagatgggtgttgtgccagacgcctgtaatcacagctactccagaggctgaggcatgagaattgcttgaacctgggaggcggaggtggcggtgagccccaatcgcactgctacactccagcatgggcaacaataccaaaacatcgtctcaaaaaaaaaaaaaaaaaaaaaaaaggctgcccatgaccactgccccagtgagagggacaccagcatggctaagatcaagtgctggacattcttcatgggtcagacattaaagcaggccacactgttacagagatgggctccattcatagcaacaaagtggtgagaagatgtgggaatggcagaggccagcactttgccatcaatgcaaggtgggcataaggagctggcaccagtgccagagtgcatcaggggaggactgctttgcaatatctagcacttacctcttagagtatgtttcattagggacaacagatataaatggcagacaagtgagtcccttcagtaacaggaaatagaaatcatcaagaggaacagaaacagatgtcagcagccctcatataaagtcatcatccttcatccagttaaaacctgagacagttctcacataagaaggtctaattcaaaaagagactgggttctcatgaggcaggttcatgcaaaaccaagggaagtatacaactttgggattctccagcttcccttggaaaagacctacaatcatttgcttaggtaactgagcactgaacaaaggtgagtattgttatctttcagaagctgttggccatgaaggtcttgctggcataaaacccatggttggaaacatcaccatgacccctgttagagtaatggcctaagggcaagggtcaggaaattgatgtattccttgccaacttctgcgagacgagtgttggtccactcatctctttcacggaattcaccagtctggtatcttcaaaatccagaaggatgatggcagatggcaggaaactaatgcaaacaccatcagttgtacctccactgtagcagcagtaatggatgttatctcttcattgtaatatccagggagggagaagatgacattattctcaatattctaaacaccctgtgtgtacagcctctgtgatattttttgtaatatccgtgtgggagagaattatattactcctaatatctcaggggttgtgccccctctgtgacaatgttcctaacacccaggaggggataggatgatatcacttttagcatcacagggggtgtacaccccactgtaatattgttcataatatccgggggggagagaatgatattactcccaatatcgcaaagactgtacaccaacctgtgatattatttgtaatatccataagaggaagaataatattactcccaatgtcacaggaagtgtacacccttctgtgatattgttcaaaagatccagttagggaggggatgatattactctcaatatcttaaacaccctgtaggtaagccctctgtgatattcctcataatatccagagggagaggatgatattactcccaatattgcatgaagtctacaccccacctgtgatattgttcctaatatccaggatgggagaggatgatattactcccaatgtcgcaggggatgtacaccttccctgtaatattgttcgtaatatctagaaaaggagaggataatattactttcaacatcgcagggggtgtacaccttccttgttatattgttgctaatatccagggaaaaagaagatgacattaccaccactattgcagaaggtgtacacccccccttgatatagttcctaatatccagaaaaggagaggagatattactccaaatattgcaagaggtgtacattcccctgtaatatttttcctaacattcaggaagaaagagagtgatattgcccttaatattgaagggagtgtgccccccccgtgatattgtttctaatatccaagaaatgaaaggatgatattactcccaatatcacaggggctgtacagccccctcccatgatattgttcccaacatcggggggggggtgaaatagtattattcccagtatcacaataggtgtacacacctgtcgtgatattgttcctaatacccatgggggaaaggacgatattattcttaatatctcagagggatgtacaccctccctgtgatattgttcctaatatccggggtgggagaggatgatattacccccaaaatctcaaagggtgtacacccctcttgtgatattgttcctaatatccagggtggagaggataatattattcccaatatccaggaaaggaaacgatgatgttactgtgaatattccagggggtgtcctcccctctgtgatattgttcctaatatccaggttggggagattatgatatttctccaaatatcacaaggggtgtacaccaaccctgtgttattgttcctaatatcgatggggggagaggacgatattactcccaatatcacagggggtgtacaccacctttatgatattgttcctaatatccatgaagaaagaggatgatattactttcaatatcgcaggggatgtacactccccctgtgatattgttagtaatacctaggagaagaaagtgtgatattactcccaatatcgcaggggatgtacacgcttcctgtgatattgttcctaatatttagggggaaaggggatgatattactcccaatatcgaatggtgtgtacacccccccgtgattctttttttttttttttttttttttttgagatggagtcttgctctgccgcccagactggcgtgcaatggcgcaatctcggctcactgcaacatttgcctcccaggttcgcacgattctcctgcctcagccttcggagtagctgggattataggcagctgtcaccataccaggctaatttttgtatttttagtagagttggggtttcaccatgttggtcaggctggtcttgaattcctgacctcaaataatccacccaccttggcctcccaaagtcctgggattacaggcataactttccctgtgatattcttcctaatattcaggaagaaagaggatgatattgctcccaatatcgcagagagtgtgcactcctcctgtgatatggttcttaatattcagaggaggagaggatgatattactttctatattgcagaaggtgtacacctccctcgtgatgtctttcctaatatccagtgggggagaggttattagtctcaaaatcacagaaggtgtaaacccccatttgatattgttcctaatattcaggggtggggagagaaaggtattactcctagtatttcagggcatgaacacccccaccgtgatatcattcctaatatccagaaggggaggcaatgatatttctcctaatatcacaaagggtgtacaccccttctgtgatattgtaaatattctgtgtgtacacccccctgtgttatagtctgtaatatccgggtgggggagagggtgatatttctccccatattgtaggggatgtacacccttctgtgatatggttcgttatatccagggaagaaaaaggtaatattgctgcccatattgtggagagtgtacacccccatgtaatatggttcgtaatatccaggagtggagagggtgatactgctccttacatcgaggaaggtgtacaccttattgttatatgattcgcaatatccaggggaggagagagtgatattgctccccatgtcgcagggggtgtaaaccctccgtgatatgattggtaatatccaggaaaggaaagggtgatatttctccccatatcgcgggggacgtacatcctcctgtgatatggttcgtaatatccaggaggaaagaggaaaatattgctcttcataacccgaggggtgtacaacccctgtgatatggttcgtaatacccagaagtgtacacccctctgtgatatggtttgtaatatccagggggttagagggtgatattgctccccatatcgcagtgggggtacacccccctggattggttcataatattcatggggggagaaatttacatttatcctcatatcagggggggtgtacaccccccgtgatatggttcgtaatatccaggggaagaaagggtgatattgctccttatatcgcggaaggatcaccctcccctgtgatatggttcataatacccagacgggaagagggtgatattgttcttcataaagcgaagggtgtacagccccctgtgatatggttcataatatgcaaaaggggagagggtgatattgctccccatatcacggagggtgtactcccttctttgatatggttcgtaatatccaggggtgtagatggtgatatagctcgccctattggggagggtgttcacccctctgtgatattgttcgtaatgtccagggaaagagaggatgatattactcccaatatcgcagaaggtttacaccactctgtgatattgttcataatatccagggaaggagaagacgatattactcccaatatggcagggggtgtagaactcctgtgatattgtttgtaatatccaggcaaggagaggatattactctcaatatcgcagaaggtttacacccctatgtgatactgttcatgatatccagggaaaaagaggatattactccctatatcacaaagggtgtacacccctttgtgatattttttgtaatatccaggggagagaggataatattactctcaatatcagaaggggtgaaaaccctcctgtgtcattgttcataatatttagggaaggagagagtgatattactccaaatatcacagtgggtgtacacccccctatgatattgttcctaatttccagaaggggagatatgatattattgccaatatcgcagaaggtgtacaccttactctgacattgtttgtaatatccagatggggaaatgatgatattactcctaatatcacagggggtgtacacccccttgttttattgtttgtaatattcaggggaagagacgattatattactcccaatatcgcagggtgtgtacaacactctatgatattgttcataatatccaggggaggagaggaagtgtacacccccccgtgatattgttcgtaatatccagaggtagagaggatgatattactcccaatattgcaggtggtgtacacctttctgtgatattgtcatgatattaagaaggggagaggatgatattactaacaatatcacaaaaactgtacactccctgtgatattgttcataatatccagaagaagggaggatgatattattctgaatctcgcagaagatatacaccaccctgtgatatggttcataatatcctaggggaaagaggatgacataactgtcaatatcgcagggggtgtacaattccctgtgatattgttcacaatattcagagggaaaaaggataatattactttcaatatcgcaggcggtgtacacattactgtgttattgtttataatatccggaatgagagaaaattttctcccaatatcacaggaggtgtacactcccctgtgatattgttcgtaatatccagggaggggagaggatactattactcccaacatctcagggagtgtaggccccccctttgatattgttcctaatattcggaagtggagaagatgatattacttccaaaatcgcagggggtgtacactccctctgtaatattgtttctaatattcatgagtggaaagaaagatattactcccagtattgcaggggacatacaccacactgtgatcttgttcacaatattcgggggggagaggatgatattactcccaatatcaaagtaggtgtacacccccttctgatattgatcgtaatatccagaattaaagatgataacgttactcccaatattgcagggggtgtacatttttgaatactgttcataatattaagagggggaggggatgatatctgtcccaatatcgcaaagtgtgtacacctcctgtgacattgtcccaaatatccagaggaaaaaaggatgttattactcttaatatctcagagagtgtacacctccctgtgatattgtttgtaacatccagaagaaagaggctgatattactcttaatatcgcagggggtgtacacccccgccccgggatattattcgtaatatccagggggaagtggaatgttcagaatgggagaggatgatattacttgcaatatcatagtgggtgtacaccccactgtgatattgtttgtaatatccgggaaaggagaaaatgacattcctccccatatggcaggggctgtacaccacctatcatattgttcaaaatatccagaaggggagaggatatgtctccaagtatcacagggggtgtacaccccgctgtaatattcttcctaatatccagggtgtgagaggataatagtactcccaatatcccagggcatgtacaccccccttgtgatgttgttcctaaaattcatggggagaaagaatattactcccaatatcacagggggtgtacatacactctgtaatattgttgccaatatgcagcaggagagaggatgatattactcccaatatcacaggggctgtacaccccgctgggatattgtttctaatatcaagggggaaaaaggatgatattactcccaatgtcgcagggtgtgtacttcctctttgtgacattgttcctaatatccaggagagaagagggtgacattccttccaaaactgaaaggggtgtacacaccctttgagatattgtctttaatatccagaacgaaacaggatgatataactcctaatactgcaggggggtacaccctctctgtgatactgtttctaatatccaggaggggaaagaaaaatattaatcccaatatcacagggggtgtacattccccctttaatattgttcctaatatccaggaagacacaggatgatactatttccagcagcacagggcatgtacacccctttgtgatattgttcctaatatccaggaaaagagaggatgatattactgtcaatattgcagggcgtatacactggttctgtgatattgtttctaatatccgggggtggagaaaatgatattactcccaatattccagcgggtgtacacccgttctatgatattgttcctaatatctgggggagagagaatgatattattgtcaatatcacaggggatgtacagattccctgtgatattgtttctaatattcacagggggagaagggtataatactcccgatatcgcagggggtgtacactccccctgtgaagttgttcctaatatccagggattgagagaatgatattactcccaatatcacaggcggtgtaaaccccctgtgtgatattgttcctaacatccagaggaaaagatgatgatattattttcaatatcacagggggtgtacgcatccctgtgatattgtttctaatatccaggggaggagaggatgatattattgttaatatcgcagggggtgtaccccaccctgtgatactgttcctaatatccggggtggaagaggataatattgctcccaatatcgcaaagggtgtacaaccttcctgagatattggtcctaatatccagggagggagaggatgatattactttcaatatcacagggagtttacacaacccctgcgatattgttcctaatatccagcggaagaagagttaggataatactattttcaaaattgctgggtctgtaccccctccccgtgatattgtttctaatatccaggaggggagaaagtaatatgactcccaatatcttagaagatgtacaccctccccataatattatttcttacatccagggggtagaggatgattttgctttcaatatcacagagggagtaaacctttccggtgatattgtttttaatatttaaaaagagagaagataaaattactcccaatacaaaggggatgtattgtgtactcccccctctgatattcttttttaatatccagatggagagaggatgatattactttcaatattgcatgggatgtataaatcccctgtgttattgttctgaatatacaggtggggagagtatgatattactccaaatatcgcagggggttctttccccctgtgatattgttcctaacattcagggagggagaggatgatattactcttaatattgcagggggtgtacccacgcctatgatattgttcctaatatccagagggggagaggatgatctaactcagaatatgacaaggggtgtacacacagcctgtgatatggttcctaatatacaggggagaaggggataatatttctcccaatatcgcagggggtgtacaaccccctgtgatactgttcctaatatacagaaggggacagcatgatattgttcctaatatcgcaggaggtgtacaacgccctgtgatattgttcctaatatccagggcgggagaggatgatattaccctcaatatcgcagggggtgtgcactttccctgttatattgttcctatgatccgggtggggggaaatgacattagtcccaatatcgcaggatgtgtgcaccgctcccccgtgatattgttcctaatatcaagggggagagaggaggatattactcccaatatcgcaagggatgtacatcctccatgcgatattgttcgtaatattcaggaggagagaggatgatattactcttaatatcgcagaaagtggacacccaccctgtgatgttcttcataatatccagggaagcagacgattatatgactttcaatatcgctgggagtgtacatcccttttgggatattgtttctaatatccaggaagggagaggattatattactctcagtattgcaggcagtgtacaccttttttgtgatattgttcctaatattcagaaagggaaaggatgatattactcccaatattgcaggtggtgtatatccccctctgatattgttccttatatcaaggaagagaaagaataatattactcccaatatcaaagacagtgtagacccctcctgtgatattgtatttaatatccatggggaaagaggatgatgttactcccaatatcgcagggggtttacacccacactgtgatattattcctaaaatccagtggaggagaaaataatattgctcccaatattgcagggtgtatacaggccctcccccgttatattgctcctaatatccagcggtggagaggatattactttcaatttgtgtagggagtgtatacccccctgtgatatttttctaatatcaaggatgggaaaggatgacattactcccaatatcgcaggaggtgtacacgccctgtgatattgttcctaatatctagggaaggagaggatgatattactttcaatattgcaggagctgtacaccctctgtggtattgttcttaatatttaggttgggagaaaatgatatgagtccaaatatcgcagaaggcatacacacttccaataacattgttcttaatatccgggggagagggtgatattactcccaaaatctctggggggtgtacacccccttctgatatttttcctaatatccagggaaggaaacgatgatattactataaatattccaaggagtgtacaccttcctaatatcctaatattgttcctaatatccaggggtgggagaggattatattactcccgatatcgcagtgggtgtacacccctcctgtgatattgtttctaatatccaagctaggagaaaatgatatcactctcaataccacagggggtgtacaccttccgcatcatattgttcctaatattcagagggaaagaagatgaagttactttcaatatcggaggggttgtacacaacccctgtgatattgctgctagtatccaggaagaaaggggattatgttactccccttatagcagggggtatacacctcccctgtaatattgttcctaatatcaaggctgggatatacgtggggggaaggatgatattactcccaatatcgcaggggttatacaaccttctgtgatattgctcctagtaaccagggcagaagaagatgatattactcctaatatcgcaggaggtgtacactcccccattatgttgttcccaatatgcagaaaaggagaggatgacattattgccagtatcgcagggtgtgtacaccacccctgtaatattgttccaaatatttagggggagagaggatgatattactcccaacatcgcagggggtgtacacacatcccctgtaatatagttcttaaaatctaggggaaaaggggatcttatttctctaaatattgcagagggtgtacactccccggtgatattgttcctaatagccgggagggagataattaaattactttcaatatctcagagagtgtacatcgcccttgcgatattgttcctaatatccagagcaaaagagaatgatattactcccaatatcttaggagtgtacatttaacctgtaatattgttcctaatatccagggggaagagaatagtattactgccaatatcgtaggggttgtacaccttttctgtgatattgttgcaaatatttagtagagggaaagaatattactcgcaatatcacagggaatgtatacttcccctgtgatattgttctgatatccagaaaaagagagggtaatattactcccaatattgcagggggtgtacaccccccttgtgatattgatcctaatataaaggaaggaagaggatattactcctcatatagaaggggttgtccaccccccttgtgatattattcctaatattcagggaagcagaggatgatattattttcaatatcacagagggtgtgcagtccacctgtgatattgttcttaatattcggggggagaggatgttattatgcctgatatcgcagtagaggtacacccctcaagtgatactgttcctaataaccaggggtgaagaggatgatattactcccaatatcgcaggtggtgtacacccccccatgatggtttctaatatacagagggggagaggaaaatattactcccaaaatcgctggaggtctacaccccccttgtgatattgttcctaatatccaggaaaggaaacgatgatattactgtgaatattccagggggtgtacacccgctttgtaatattgttcctcatatccagggtgtggagaggattatattactcccagtatcgcagggggtgcacgacgcccctgtgatattgtttttcatatccaggaggggagattattatcaatatggcaaggggtgaacaccccctgtgatattgtacttaatagttaggttggcagaaaatgatattagtctcgatatcgcagggggtgtgcactccgcctggtgatattgcttttaatatcaagggggagaaaatggcattactcccaatatcgcagggggtgtacaccgctcatgtgatattgttcctaatatccaggtggagagaacataatattactcccaatatcgcacaaggtgtacacccctcctgtgatatggttcctaatatccatgggaggagatgatgatattactcccaatatcacaggggatgtacaccacccttgtgatattgttcctaatatccagggaagaaaacgatgatattattgtgaatattacagggagtgtacacactccctgtgatattgtttttgatatacagggtgggagaggatgatattactcccaatatcacataaggtgtacaccccccgtgatattgttctaaatatttcggtggggagaaaatgatattagtctccatatcacagggggtgtgtgctcctcaggtgatattgtttttaatatcaagagggggaggagattatattactttcattatcacagggggtgtacacccctcctgtgatattgttccttatatccaggcgaggggaaaataatattactctcaatatcgcaggaggtgtacacaccccatgtgatattgttcctaatattaagggggaaagaagataatattactttcaatatcacagggtttgtactcctttcttgtgatatagtttttagtatccagggggaaagagcatgatattactcccattgtagcaaggggtgtacacacctcctgtgatattgttcctaatatccagaagtggtgaggatgatattactcccaatatcgcagggggtatacaccccacctatgatattatttctaatatccatgggaaaagagtatgatattacacccaatgtcgcagagggtgtgtatttttcctgtgatattgtttctaatattcaggcggggagaagatgatattactctcaatatagcagaaattgtacatccccgctgtgatattcttcataataatcagggaaaaagaggatgatattactaccaatattgcaggggggttacacttcccctatggtagtgttcctaatatccaggaagaaagaggatgatattaatcccattatccaggaagtgtacacccaccctgtcatgttgttcctaatatccagcagggaagaggatgatattacaccccccccccgtgatattctccttaatatccaggaggggagaggctgatattactggatatatagcaggggtgttcataccttctgtgatattgttcctaatatccagaaaaggagaggatgatattacttccaatatcgcagaaggtgtacacctccctgtgatattgatcctgacattcagaaggggagaggatgatattactcaaaataccgcagggcatgtgcattcccttgtgatattgttcctaatacccagaagggaacaggataatattactttcaatatcgcagggagtgcacacccccctttggtatggttcttaatatccagaaggaaagagggtgctattactttccatattgcaaggggtgtacaccccactgtggtatggttcataatatccaggcagggagagggtgctattactccccacagtgcggggcatgtacaccctgctgcggtacggttcctaatatccagggggagagaggatgctatgactccctatatcgcggggtgtgtacacccctgtgtggtatgttttgtattctccaggaacggagagggtgttgttacccctcatatcgctggaaatgtacactcccctgtggtatggttcgtaatatccaggggattgagggtactgttacccccatactccccatatcgtggggggagtgcacctccctgtggtatggttcgaaatatccagggtaagagagggtgctattattccccattttgcaggaggcgtacacccccctatggtatggttcgtaatatccggggtgaggggatgctatcaaaagaagagagaaagagaccccccatattgttctatattattttatactcagtacctgttttaagaagaaacaaggaagtgaaaccaaaagcaggcagcccggcgccaggcaccagacccaaaaccagacccgaaaccaggcctgggcctgcctgaccttagcctgatagttaaaattcaacccatgacctagcaaccaatgttatccatagattccagacattgtatggaaggacattgtgaaatttcttgttctgtgctgtttcactctgattaccggtgcctgcagcccctgtcacatacccactagattgctcaatcaatcatggccctttcatgtaagatctttagtgttgtgagcccttaaaaaggacagaaattgtgcactcaacaagctcggattttgagacgctagtctttcgatgcttccagctgattaaaagccacttccttcactacctcggtgtctgtggggttttgtccgcgactcctcctgctacactatgactccccatatcaaggggggtgtacacccccctgtggttcgtaatatccagcaggggaaaaggtgctattactccccatattgcagggagtgtacacccccttgtagtatggatcgtaaaatcaaggggggagggaaggtgtaattatccccatatctcagggggtgtacacccctttgtggtaaagtttgtaatatccagggatattacagggatattatccccaaattaatacttttataatttcttatgcctgcctttactgcaatctctgaacataaattgtgaagatttcatggacatttatcacttccccaatcaatacttttataatttcctatgcctgtctttactttaatctcttaatctcatcatctttgtgagctgaggatgtatgtcgcctcaggaccctgtgatgattgcattaactccacaaattgtttataaaacatgtgtatttgaacaatatgaaatctgggcaccctgaaaaagaacaggataagagcgatgttcagcgaacaagggagataagcataaggtctgactgcctgtggggctgggcagaacagagtcacatttttcttattgcagaaaatgagtaggagaaatatcactgggaagggaacgcattcctaggggaggcctatggacggccgctctgggggtgtatcccttatgtggttgaagataagggatgaaatacaccctggtcccctgcagtgccctcaggcttgctaggattagaaattccagcctggcgaattctagtcagaccagttctctgctcttgaaccccgtttcctgttaagatgtttatcaatgacaatgcgtgcacagcaggacatggaacctcaatagtaattccattttctccctggccttgtgaccttgctaggcccttctgcccttgtgatcttttattgccatttgaagcatgtgatctctgtgacccactccctattcgtatccccctccccttttgaagtccctaataaaaacttgctggttttgcagatcaggtggtcatcacagaacctgccgatatgtgatgtcaccccggaggctcagctgtaaaatttctctttcgtactctttcactttatttctcagaccaggtgacacttaaggaaaatagaaaagaacctactttgaaatattgggggctagttcccccaatagacattgttcctaatatccagaaaaaaagaagatgatattactcccaatatcacaggggttgtgaaccccacctgtgatatggttcctaatatccaggaagggagagaatgatattactctccatattgcagggggtgtgcacatccctgtgatattgttcctaatatccaggggaggagagggtgatattactcccaatattgcaagggttgtaaactccaccctgtaatattgctcctaatatttaggatttagggggggagaggataatattactcccaatatcgcaggggatgtatatgccctctttgatattgttcctaatatccagggggggagaggataatattactttccatatcacaaagagtgttcacccccctgtgatattgttcctaatatccaaaaaggaagaggatgatatcaatcccaatatcacaggaagtgtacaccccccccttttatattgtttctaatatccaggggaaatgagggtgatatttctctcaatatagcagaatgggtacactccccctgggatattattcctaatatccaggggaaaaaaagaggttgatattcttcccagtatagcagggaatgaatacaccctttgtgatattgcttctaatatcaaggggaaaagaggatgatatgactcccaatatcacaggggatgtaaacctgtggcgttgttgctaatatcaaggagggaagagtatgatattactcctaatgtcgccgaaggtgcacactttccctgtgatattgttcctaatatccaaaagggaagagaatgatattacccccagtattgcagggtgtacaccacccctgtgatattgctcctaatacccaggaaaaaagagaatgctattacccccaatatctaaggggacgtataccttccctgtgatattgtttctaatatccaagtggggagaggatggttttactctcaatattgcagggagtgtacactccccctgtgatactgtttctaatactcgggctgggagaaatagtattactcccaatatcgcagtgatattgtttccctgtgatattgtttctaatatctagtgggggagataattatattactaccccatacacaggggagggtgtacattcccctgtgatattgtttgtaatatccagggaaggagaggatgttactcccaatatcacaggggttgtacaccccttttttgatattgttcctaatatctggggggcagagaattatattactgtcaatatcacagagtgtgtacaccccctctgttatattactctttatattcagggcggtagaggatgatattactccctatatcacagggggtgttcacccctcctgtgatattgtttataatatctaaggggaaagaggatgatatcactctcaatatcaaaggaaatgtacacctttcctgtgatattgtttttattatataggggggcagaggatgatattaagaacaataccacaggggatgtacacccacgtattgatattgtccctaatatgtatggggaaagaggacagtgtaactcccgatatcgcagagtgtgtacacccccttgtgatattgtttctgatatacacggggagaaaagataatatttcttccaaaattgcagggggtgtacaaccccctgtgatattgtttttaatatccagtgggggagagaatattactcccaatattgcagggcgtgtacacaacccctgtgatattgttcctaatatccagagtaggggaggatgacattactttcaatatcgcaaggggtgtacattcccctgtgatattgctcctaatatccatgaggggagaggatgatattattcctaatatggcaggggctgtacaccttccctgtgatattgtttctaacatccagtgggggagaaaatgatattactccctatatcacagaaggtgtacactttccctgtgatattgttcctaatatccagaaggggagaggataatattactcccaatatcgcaggaagcttacaactcccctgtgatattgtttctaatatccagggaggtagggatgatattactcccaatatcgcaggggatgtacactcccccgtgacattgtttctaataaccagggggtgagaggatgatattacgcttaataccgaagggggtgtacacacccttgtgatattgtgcctaatagccagggggaagaaaattatattaattttaatatttatggggaaaaaggatgatattactcccaatatcacaggggctgtacaccgaccttttgatattgtttttaatatccagaagagaagaggataatattgctcccaatatcagaaaaggtgtaaaccccttctgtgatattggtcctaatatccagggagggagagaataatattactaccaatatcacagaaggtgcccacccccaaggtgatattgctcctaatatccaaagataatagggtgatgttactcccaatatcacaggaggtgttcacaccccttgtgatattgtttctaacgtacagggaagggagaggatgatattattcccaatatcacaggaggtgtatactcctctgtgatattgattttaatattcggggggaaaggatgatattactccctatatcgcagagggtgtacaccctctgtaatattgatcctaatatccagggcgggataggatgatattactcccaatatcgcagaaagtctacacaacccccagtaatattgtttttactatccagggggaagaggatgacattactcccaatttcacagagtgtgtacactcaccatttgatattgtttctaatatctagggggagagaatatattactcccaatatcacaggaattgtacaccacctctgtgacattcttgtgaatatccggggaaaaagagaataatattactcccaatattgcagagcgtgtacacccctccatgatatcgatactaatatttttttaaagaggatgatattactcccattgtcacaggatgtgtacaccccccttgtgaaattgttcataatattctggggggagagcataatattactccccatatcgaaaaaggtgtccaccctccttataatatggttcctaatatccaggatattacttaatccaggatacttgtaataccctaaatatacaattgcttgaacctccacctcccaggttcaagcaattcttctgcctcagcctcccgagtagctgggactacaggggcacaccaccacacccagctaatttttttttcttgtatttttagtagagatggggttttgccatattggccaggctggtctcaaactcctgaccttgtgatctgcccacctcagcctcccaaagtgctgggattataggcgtgacccaccgtgccaagccaggaagaggatgctctatagatttccccaataagagatggctttgcagggccattccaaaatatgtcaaagaaatacatttggggataaaatactttgatttcctttagggaatgttatctattatgtgatgctataccagagtcaggttggagtcggttatcttattgcaacaaagagtctgttccgtcactgttgggatctctattttttcctcttatttcttgagacagggtctcactctgtcacccagtctggagtgcagtggtgcgatcttcattcactgaaacctctgcctcctgtgttcaggtgattctcgtgcctcagccccttaagtaactaggattacaggtgtgcgccaccacacccagctaatttttgtattttcagtagagatggtattttgccctgttggccaggctggtcttgaactcctggcctcgtgtcatctgcccacctcgacctcccaaagtgctgggactgcaaatgtgagctattgtgcccagccaggatctctgttttaatgttagtgctggtcactttgcatgaactccaaagggaagaaatataatgaggtgtgtctgaccccctgccttctcatcgtgacctgaattagtttttcaggtttgcaggggatacccttggacaagaaggggctctattcggttggttggggggattagaattttactttttgtttacaatatttctcctgaaagagttaggggctcacaaggaatttccgcgtgagcaacttatgaggaaagccatctgggaagatatgtgtccttgtgtcactgggatattctcgtttaccccaatgatacggcaatgacgcagggttgtgaaattacagctatgtgtttggggaaaaaagaaagcaggattgtgtgactacgtttccaaacttcacttgcccttagccatagtgagttgggggcctggagattctgttttctttcacaatgatatagatacaattaaatgtatagaaagcaaaaaaataaaaaggtgagtaatgaggaacctctgattcctgagtggccatgtagttacccatggcacagagccacagttactgaaggtaaagtttgctggggaatttagaaatgaatccagctcttggaggagtcagtttactggatgcctaagaaaatgcaaacaaaataagaaaaaagggtaatattcaatcccatagttattgttacctgtcatagctaaagtaaaattaaaacagagtgctggcttcaatcttgatgctacactaagcttagatttcagtgaatgtgagtctcagccactagctcagagccacctcccaaagaccaaatcatgtagggacaatagaaagtacttctgagaattgtggttaccaagaacctagtaactgttggggaggagcaaaacaaagtacagaaaccagagggtacaatctgagtgagactgctatcagcttctggaggagcctttactaaaatgaatgatgagagtaactggatgatgagagtaactaatggatgatgagagtaagcaatgtctttggttttcttttttttttttttttttttttagcagacgtctcactcttgtcgcccaggctggagtgtaatggcatgatctcgcctcactgcaacctccacctcctgggttcaagcaattctcctgtctcagcctcccgagtagctgggactacaggcactcatcaccacacctggctaatttttgtatttttagtattttctggtgagggtccaggtttccggaaacaactcagagacatatgttaagatgttatctttagttttcacagggaaccaaatatgttacgactccaatttccttggctattgttttaagttaccattaccttctcgttgatcaagttgctcatttacttctcaagcctagctagatgcctggaatttcccttgaaggaagtcaagattttcctttatctccatactggctgatggtgatcgagtaagcccctaagaggggtccctgctccatctcgagatgctgctagattctacagtgcctaataaacagctctcgcctggccgacaaagagctgcttgctctctggatagcaattccaaagtgaacagacaacatcctgtttggaagactgccactctgttagaagaagcatcaggaaaacctttcttttgagctatttataactaacagcaattgaccaagtatacttttgtgagtgaaactgacctttctccctgtaagaattctccaaaatttggaaactatttgtgagtatttttacttatggcaatataattattggcacaagctcaatcagattcggttttctttcgtaacaggaaccattggagatactcattactctttgaaggcttacagtggaatgaattcaaatacgacttatttgaggaattgaagttgactttatggagctgataagaatcttcttggagaaaaaaagactgggtatattttcaatatgctttccttttaaggtccctcacctgtggaaagtaaagaatgtcactttctgacaggctcaggaacctcaagttatgtagggatctcaagaagatgggggaattcacccagttcatacaggtgaaattgctgttgcaaagattatgaatatgagagaagtccagcatggctgacttcatctcgtgtctggcctcaggctggctgcccttgctcactcttgggcataggccaagctagccatgggaggaatttagtttatagtttaactttgaagcacggatgataatagtctctccctaaaatgaaccccttccttgctcagggactgaaactacctttgtatgacaaatgaaagcccacaagattaagattatgagaggggcctgaattctgctaaaatgcaggtgtagctgactgataacaagtcattgtcccacagcttgcctttctataatctcttgcttctcaggagtcacatggccagaggtcctgagatttccagtcctgtgacccccacccagagatggacttagtgcatgaggaccattttccacacccctatgatttcatcctcaaacaatcagcagcaaccattccctagccccctgccttccaaattatccataaaaatcctagcctctgagttattagggagattgattaataatcccagtcctaccccttgggttgctctgatttaattaaaccttctctactgcaataccacggactcagtaaattggttttgtctgtgcaatgggcaagaagaacatgttgcatggttatacaggtactacaagcacagtctgatggcaaattattggttttgcttcctgcccttgatgtttctaaacatctagtccaaaattacttgtgaaaggtccagcaaagccaattttaaaagaggctatatggccaatcactattctttctacacattattgcaaataatcaggccacggctgggcacggtggctcatgcctgcaatcccagcactttgggaggctgaggcaggatcacctgaaatcaggagttcaagaccagcctaggcaacatgataaaaccctgtctctactaaaaatacaaaattagccaggcatggtggcatgcacctgtaatcccagctacttgggagactgagggaggagaatcacttgaacctgggaggcagagattgcagtgagctgagatcacaccactgcactccagcctgggcaatagagtgagactttgtctcaaataataataataataatcagaccaagtataatgaaattaaaatttattttgcaaataaattggtcctactacaatttatccttcatagaaatgtggaaactgaagataaaaaaaattaggtttcagaagaaaactatactacacctgttattagattctagccctaaacattgtttttgaggtttttattatttacctgcaatttggtctaaattctgaattatttcctgactacaagtatccaaggaataaatgggttttctttttctttatgatagttttagttggcttctaatgcaacaacaatttttattgtaatcctgtgtgcattctattcctactattcaaattattaatgttatagatctttcattgtagtacttctgaattaaccaaaatcacagtattctgaagatgattctacaaagcctgctgtttctacaaaggctgctgatgatttctacaaagcctgctgtagtgttgctgtggcctctgcttaaaaaagtagaaaacacattgatgcagcatgttcaccccaacctccctgcctaaaggctcagggaccatcttggaagaggaaggcgcgtgagattgtaagagccgaattagggggatggagtgtggagaataaggacacttcatcttggatgctcacctgccaaattgacttctgatgaaagccagctccagaaatgtgcctacagttactactttcacctaaaccctgcccttagtcaaatccttctcttcttctaagcaatcaacttcaattccttgtataacccacagtataaaagggcttttataccattctatcctattgcatgtaagccttgggtctgggaggtaacagtgtgggattccaccatctcatctccctgccacccaaacatgcctgctcttctttaagcaatattaaatgtttgtacttcagaaatttgatttgtcagcctcttcttcagactctcagcttctttggcctttgggagtaaatttgcataggcctgctcaaaacaggatgttctgggggtttgggggtgttgttttgttttgttttttgttttgtttagagacagggtctcactctgtcacccaggttggagtgcagtggtgcaatcatggcacactgcagcctcaaactcctaggctcaagcaatccccccaccttggcctcccaaagttctgggattacaagcataagccaccatgcccagccctggacttttctttaaagacatttacacagtgtaggaattactgtgggtgcactgctcaggtccccttctccaggatgctcattcctacctcatagatgattttcctgcagagatttgacctcagctgaagggcagtcacctggtccaggtggttgctattcacctccttcctgagaacagccaacagccagggacacgctagcacagagatataagagcgaccaaggtgaggccccttctgtgctgcggtgcatgctccagagcctccctgggatcagacttaagagggtctccagccagatctggtcttcgctgctttcctcgagctccccagcgcactcctgcaatgcatcttttttttttttttttttttttttgagacggagtttcactcttgttgcccaggctggaatgcaatggcgcaatctcagctcaccacaacctctgcctcgcgggttcaagtgattctccttcctcagcctcccaagtacctgggattacaggcatgcaccaccacgcccagctaattttgtatttttagtagaaacgggtttctccatgttggtcaggctggtttcgaactcctgacctcagttgatcctcctgcctcagccttccaaagtgctgggattacaggtgtgagccactgtgcctggcccaatgcacctcttgaatcacctcctcatgctttgcttttagagaacatgatccccaacatgtgattccagcaaagattctagaaagccaaccgtgacaatcacttctgggtttagatgacccccccccaccacaagatggcagtgagcacctcatcacagaggtgctgatggtctgcagcaccgcgccaggccagaacgtgccttttacagaagaaaataacccagtagctgactaggatggtgaggagggctggtgagcactgcggtagtgagagggacactagcatcactgagatgcaagtgatggtcatttttcataggtcaaagctcaaagcaggggacagttacagggcagggcttcatagcaccagtgtgatgaaagtatctgggagtggctaaggccagcactatgccatgggaagcaaggtgggcctgaggaggaggcagcagcgtcagcctgcaacaagtgggggctgccctgcagagacctaagagtcatgttatagagcacagtgtctgtaaggccaagaagtgtggacagccaagtgtgtcaattactagacatactcaagaggagcaggaagggcagggcatggtggctcatgcctgtaatcccagctacttgggagactgaggaaggagaatcgcttgaacccgggaggtgaaaattgcaatgagccgagatttcgccactgcactccagcctgtgtgatgggagcgggactccatctcaaaacaaaaaaagaaaaaggaaaaagaaaaaaagaaaaacctaggtatacttctcaagcaaataaaaataatcaaaaccaatatcatgcccgggcacaaatttcatatatataacagatttaaatatatgagggtgattatcctctcatatctccatttttttttgtttttccatttttttctttactaaaaaaagttaatgccaatgacacacaatttttttttttttttttttttttgagatggagtctcacttcttcgccctggctggagtgcaatggcgtgatctcgactcactgcaaagtctgcctcctgggttcaagcaattctcctgcctcagcctcccaagtagctgggaccacaggagtgagccaccacacccagctaatttttgtatttttaatagagacggggtttcaccatattggccaggctggtctcaaactcctgatctcaaataatctgcccgcctcggcctcccaagattctgggattataggcgttgagccactgcgccccgcctatgtatgattttttttttaattttattttcataagtttttggggaacaggtggtattttgttacatgagtaatttctttagttgtgatttgtgagattttggttcacccatcaactgagaagtatacactgaacccaatttgtggtcttttatccctcacccccttcccaccctttcccccggagtccctgaagtccattgtatcattcttatgcctttgcatcttcatagcttagctcttgaacccttactttctgtttgagggagaagacatatcatctacaagtagatactgtgtaaacattccattgcatgactatcccataacttatttattatttgtgtttggttatttgctgctatgtaacaaccccactcccaactaaatggtgtgacaattccatgattctgtggatcaaaaattctgaaaagtcaaacccaaggagttttgtctctgctccatgatgctaaagcctccgcaggggtgaggcgaatggctcagggtgactgaaaagctcagggttggaacagctggggatgaggcctctatgtataagatgattcttcactcacaggtctgaaactatggtggggacagccagaaggctcggctcagctgggacagtcacctgagccctacacatgacctctccaacatggtgatcctgaagcagttgggtttcttacacagcatcacacttttcttttttttttttttttttgagatgaaatattgctctatcacccaggctggagtgcagtggcacgatctcagctcactgcagcctccgcctaccaggttcaagcgattctcctgctccagcctcccaagttgctgggattgcaggcgcctgccaccaagcccagctaatttttgtatttttagtagagacggggtttcaccttgttggccaggctagtcttgacctcttgacctcaggcgatccgcctgcctcggcctcccaaagtgctgggattacaggcatgagccaccgcgcccggccaaagctcacacttcttatgattcagccttagatgtcacatcagttcattttccccacacttattagtgttagaagtcacaagcccacccatactcaggggactggcacacagaccccactctcaatggaaggggtgggacaccaccattcctgctgatgggcatttgggtaacttcctgtttgaagctattaagattgggctgctgtggccgggcgcagtggctcacgcctctaatcccagcactttgggaggccgaggcgggcggatcacgaagtcaggagatcgagaccatcctggctaacacggtgaaaccccgtctttactaaaaataccaaaaaaaaaaaaaattagctgggcatggtagcgggcgcctgtagtcccagctactcgggaggctgaggcaggagaacggcgtgaacccgggaggcggagcttgcagtgagccgagattgtgccactgcactccagcctaggcgacagagcaagactccgtctccaaaaaaaaaaaaaaagattgggctgctgtgactattctagtaggtgtctttggtgagcgcctacacgtgtttctctttttctctttagtatatgcccaggaggggaactgctggctcccagataccgtatgttcagggtcacacacacttccacagggttttccaaagcccttgtaccagcacgcactcccagcacctgtgtgactgctccagctgtcccacagtctcatcagttctattgctgatattttcattttagcttaagttatatttaataggaaaattaccgttgcctctgccccccgttcctgcctgtaggagtttctcgtagctgttgctacaggtggccacaaatctgtcacttaaacccacacaaattgatgtccttatggctttggagtcagaagtgtcaactgaaggtactagcagggctgtactgacctggtggcctcagggagcatctgtgctgcttctccaccttctagaggctgctgcatccctcgctccagccccttcctgacaccactcaccctcctacttctgttatcacatcctcaccttctctgtgttcagggctccctctgtctctctcttgcaagcacacttgggattccattgagggccacccacataacccaggagaatttctccacctcaatatccttaacaactgcagagcccttttgccataaaagttaccattcacgggttccagggattgtgacatgggtagctttaggagtgattattcctgcctgtctcccgctcaccagaacttggactttctctctcaacaggagccccctgtgtgggaatagcctgtctcaacgacgccctctataaggacctgcttcctcaaaggacctcatagtcgggtcctgcccctcagtgtccagtctgccttggctggaggggctgcaggggtgtgttggcgccacctggtggagacagggcatcacagcaggtgggagcccagtagaagcacaaccaaaacatgggtaatgtttaaaattttctggctaagcgctgtggctcacgcctgtaattccagcactttgggaggccgaggtgggtggatcacatgaggacgggagtttgagaccagcctggccaacatggtgaaacatcccctctactaaaaaatacagaaaaattagctggacatgtggcgcgctcctgtaatcccagctactcgagaggctgagacacgagaatcgcttcaaccccggaggggttgccgagatcgcgccactgcactccaggctgggcgatagagcgagactctgtctcaaaaaaaaaaaaagaagaggggaggcgaggggaggggaggggaaaagggggaatttgtttggagctgagacatccatcttctcctgacctcagatatttgcactcctggttatgaagccttcacacttggactgaatacaccaccagctttcccgatttccagcgtgcaaatggcagatcgtgagacttctcagcttccataattacatgagccaatttatatatataaattgggtcctccagaaaaacagaataaattatatatataattatacgcataacttaattaaattatacgtataacttagctatatatataatttattctgtttttctgaagaaccctactgacacaaatgttgagcatcttttcatgtgcttattggcttaataacttgtacatcttctttggggaaatgtctattcaagttctttgcccattttgtaactgaactattaatatttgtctttacattgttgagttgtaaaagttccttatatattctagatactagagccttatcagatatatttctgcaactattttctcctaatatataggttgtgtttttattttctttttctttttttttttattgagacagtctcactctgtcacccaggctggagtgcagtggcatgatcttggctcactgcagactcgacctgccaggctcaagcaattctcccacttcagcctcctgagtagctgaggttataggcacttgccatcgcacccagctaatttttgtattttttagtagagccgaggtttcgccatgttgcctaggttggtcttgaactccctgcctcaaagcgatctgtcagcctcagtctccctaagtgctggaagtacaggtgtgagccacagtgcccggccatctattttcaatagtgttttttgatgtacacaggtttggaattttgataatgttcaattcatccatttttttttttttttttttggttctttctactggaccaccactcttgagccctctaatccaacctccacgcggcagccagagggagctctctaaatgtaattactctttccctgctccacctgctcaaaacagtgtcacatttgtgatttaaaacagtatttctcaaacctaatttgcaaacaaagcaggtggaactcttcttgtatgcacagcatctgatttggttggtctggcatgggtctgggagtgagcacacctaccaagcggctgctggggtaacttgcgttttccactgatgatttcagcaatgtttccggtcccacatgctcctccagaaccttgtactcccccatgaaaaggtggagtccatttccccttcctttatttatttttttgagacgaagtttcactcttgttgcccaggctggagcgcaatggcgtgatctcagctcaccgcaacctccgcctcctgggttcaagcaatgcttctacctcagcctcccgagtagctgggattacaggtatgtgccaccacgcccagctaattttgtatttttagtagagacggggtttctccatgtcggccaggctggtctcaaactcccgacctcaggtgatccgcccgcctcagcctcccaaagtgctgggattacaggcgggagccaccgcgcccggctatttccccttcctttgaacctgatcaggacttgacgatggcatcaacatggtgagagtgaccctgcatggcttatgaggctgggttacacaaggcgatgttgcttctgactggctccctctcaggatacatgcccttggaacccatcctctaagctccttgggagcccaacttagcccatgtggagacaagacagggagagaaacagaggcacccccagccctcagccagcatcaaccgccagacaggagagcaaatgcgccaacaatgattccagctgaagcctcagacagcgtggagcagagatgagggatccctgcagattgcagatgcgtgagcaaaatgcatgctgtcactgttttgaaacaacaatgtctgggggctgtttgttatgcagcaatagacagctgtaacaatgctgttactgctgtattccatgaatgactgcactttgagtagcagggggctagatcactagataagccccatggcttctgtgtatgctatttttctacttttatatccttttcattcactttttttttttttttttttgagacagagtctcactctgttgcccaggtgggagtgcagtggtgcaatcttggcggactgcaacctccacttcccgggttcaagcaattattgtgcctcagcctcctgagtagctgcgactatagatgcacccccatgcctggctagtttccgtatttttagtagagacggggttttgccatgttggccaggctgatctcagactcctgacctcaggtgatccacccaccttggcctcccaaagtgctgggattacaggcgtgaaccactgcacccagcctcattcactttctttacttggctcatttttccttgttgcctcaattctcctctaagatcactttcctgacatttcagcctgggcctgttgccttctctgggtcccctccgcctcctgtgcctcccccatctcagccttgatccctcagattatacttcctctgtccccaccctgaccatcttggctgtccctggatagggatgggtatcttctcccactggtctgggagatctggaaggacaggcctggaaaagacttggtcactgctggaaggagctcagttagtgtggtgctgaggacagtacgggtgaggctggccccttcacccaaactcccactctcttccatagatttcacctctgtggcccaggccataggattagggcaactccccttaaacatcgagtccatcctccaagctgtccttttttttttttttttttttttttttgagacagagtctcgctctgttgcccaggctggagtgcagtggcgcgatctcggctcactgcaagctccacctccagggttcactccattctcctgcctcagcctcccgagtagctgggactacaggagcctgccaccacacccggctaattttttgtatttttagttgagacggggtttcaccgtgttagtcaggatggtctcgatctcctgacctcgtgatccgcccgcctcggcctcccaaagtgctgggattacaggcgtgagccatcgcgcccggcctcatgctgttcttgaatagtgagcacctgttacaagtcgccccaccagcctctcacttgtacccccctcatctctttctccccaagagacagaggaccctggcacttgtgaagcatgacccagaccctggggccatggcatccaacatcctcattccccatgacccctactgtctagatgtagctgccaagagacccccagactccccgggcctctgtctagagtgccaagacagagagagaatgccctgccgcttgcatgctttgtggggtgtccttcccccttccctggctgctaggcgtgacttcaacgttctccccaacccccaaacagcagcactgacaccagctgcagacctggctcaggttagctaatgaggaccaggctggggatggagcctgaacccctaaaccccagtcctgtaccccaccctaatcctggggtctccactggacaaaacgaagcagcttggtttttcgttgttattgtttttgagatagagtatctctctgtctcccaggttggagtgcagtggcgtgatctcagctcactgcagcctccgcctcccgggttcaagtgattcttgtgccgcagcctccccagtagctgggattacaggcgcgtgccaccacacccagctaatttttgtatttttagtagagacagggtttcaccatgttggccaggctggtctgaaactcctgacctcaagtgatttcccagcctcggcctcccaaagtggaagcggcttatttttaaggagaaaactcccgtggaaaggaatcagcacctcctctgtcaacatttcacttctctgaaaagactctcacttccaacagaaagtgctttgtaacacaacaatgaggctgggcgaggtggctcatgcctgtaatcccagcactttgggaagctgaggcgagtggatcacgaggtcagaagttcgagaccagcctgaccaatatggtgaaaccccgtctctactaaaaatacaaaaattagttccgtgtggtggcgtgagcctgtaatcccagctactcaggaggctgaggcaggagaatggcttgaacccaggagatggaggttgcaatgagccgagatcacgccactgcactccagcctgggcaacagagtgagactccgtctcaaaaaaaaaaaaaaaagaatgagaacatatggacacagggaggggaacaatacacacaaacaaaatttagaaacaggtgaaaataattttagtaatatttttactaatactgatatgctcaaaatattattatttcaataagtaatctaaaaattattgagatgtcttatgttcttttcatcatactaagcctttaatatttggtgtgtattttacactcacagcacatctcaatttgcagtccccatgtttcaagcactaaataaccatgtgtgtccggtggctaccatactggacagcgttgatctgaaatcgcatctgtatgcatcaccagcatatttgcagagatccccatctcagcagcacacctgaggctcatctgcgaaagcacctgcaacttctctacaacctcccacatcacctccaaacacatcctcatgtcatctgcaaacacacccatagctcacaggccaatgcctaaatatcattgcaggcaccttcagagaaagcacttactaaaggggtatacttgattccacatctgctttgacctgcaaatctcccttctcctttacatacatttgcatctcatttgtatgtcaatctaaatccactggcagagcctcagatcatcatctcaaagtcaggtggatgtggggctgggcaggcctccaggtgttcctcctcctgcttcctctggggctcttgatcctcctcctcttccttgctgctctcctcctcctcctccaatatggtgaccagttcctcccgcagcgcccccatctccagccccaggctgcacagctgtcccagcagctggacatccactcggcgcaggttcccctgccagtaggaaggggacgtcacagggatgccaccccagagagcaaggggtctctccaggacctgggtgagagcaggtcccaactcatgtcctggccacagcgcctgggcagggtcctcactgtgcccatggaccctaactgccttcctgcttctcagagtgtctcttgatctctaactcttctctttgtctctccatttcattgtccctgacttctctctctctgtctcctccctctcttatctatatctgtccctgtttccctttgtctctgtccccatttattttttgtctttccatgcccctgtctctctgtctttatgtgttgccatttctctgcccctgcctttggctctctttctctcgcttgccctctctctgccctccccaactttctcaaattcagtctgtctctccatctctgttcctgctctccgtctctgcttcccacctctgtccctctcttttgggatctccctgtccccacctctgttcccgtccctcactctatgtctgtctctcggtgtctgtacatgcctctcatgtctctgcttctatctctcagattctgtttttcgatctctggccttctctatttttgttcatttccattcattctcatttcctctctttctctttcccttccaaacccctcactcaccagctcctccctgatccacagcagactatcgcaggcacctccagtgtctgcccctgcagtcctgagggtctgaccagggatttccactggggagacctccctcagggcctgggggggtgggcccagccccggaggcaccagtccagcctgattcagctgcctccacagttccatcgtctctgagctatggctgcaaggagcaggaagtagcaaggtccagggtggcctggtcccctggggagctgtgtgcgtggtggagagtaaagggcagagggagtgggatgggggttcctgggaaaggtatcccaaagtccactcttcagagagaatcagctggccttgtgcttttctttttccttctgaagtctaacctcaactctgctcacagggttcaaacatagcctcttgcagaggtctaactccacccttccctgcctgtctcaggcctgacccctcaggggcgctcagtgtctgtagatgcctggcaccctctgtccttccacctgccccccaccaccacttctccagcctctcctcagcctccatttgacctctggcttgcccatagcttggtccttgcttgtcctcttggcacgggtcatcctagggctttcccaccagtgtgcctttgggggcaggaatggctcccaggggcaccaagacagcaatcccttagctggagtgcctgtgtccaggctgctggcctagggccaagcagccaattctgctgaccctggacttgcctatgggtatattatccctgttgagggtgagggcttctgctgtggaaaagtctgggaagcactgcaggcctctctcggccttggacccttccttcagacccaaggtgcatatatatacatatatataatggtagatcacgaggtcaggagatcaagaccatcctggccacatggtgaaaccccgtctctagtaaaacacaaaaaattagccgggcatgctgccgcgtgcctgtagtcccagctactcgggaggctgaggcaggagaatggtgtgaacccaggaggtggaggttgcagtaagccaagatcacgccactgcattccagcctggcgacagagcaagactccatcttaaaataaacaaatgaacaatatatatatatatgtattttgttttttgagacagagtctcgctctgtcatccaggctggactgcagtggtgcaatcttggctcactgcaacctccgcctcccgggttcaagcgattcccctgcctcagcctcctgaacagctggggttacaggtgcacgccaccacacctggcgaatttttgtatgtttagtggagacggggtttcaccatgttagccaggctggtctcaaacccctgacctcaggtgatctgcccacctcggcctcccaaagtgctgggattacaggcgtgagccaacgcgcccagccccaagtcccttttaccatagaaagtaacatagtcacagtgcccagggattcacaggtatggggagagggttcgttattcagctgccacacccaccttcctaaacctgctgcccttccagtttcctcacgtgcacagccacgcccgtctgcttttagtttctcaatctgttggcttaaccttcaaaacaggcccaggatttgagcacttctcaccattccctctgccccatccccattcatctcttgcctagactgctacagcagcctcttttactggtcccctgcatccacccttgccctctaaggcaagggtccccagtccctgggccaaggaccagtaccagcccctcgcctgctaggaactgggccgcacagcaagagatgagcagcgggtaagtgagcattaccgcctgagctccgcctcctgtcacatcagcagtggcattagattctcataggaggcaaaccctattgtgaactgtgcgtgcgggggatctaggttgcctgctccttatgagaatctaatgcctgatgatctcaggtggaacagtttcatcccaaaaccatccccaccccacccccgacccccagtctatggaaaaattgtcctccacgaaaccagtccctggtaacaaaacggttagggaccgctgctctaaggtacattctccacctggcagaaataatctttacaaaatgtaaatccgattttgacactcccttcttcccactgtgaatagaataaaaccctaccaggcctgcaccgtcagcccctgcccacctctcaacccagtctcctatctctgtctgcaagctggttcccacctcaaggcctctctgctctagaggctacctctccctgcagcgcttttcccctagatctttgaatggctctttccttatcattcacttctacttcaatgtcacctcttcagagaggcctttgctgatggccctacacccagtcacttttttttatctgcttctcatcaaaattgccttgctgattcctttgtttcttattcatcctctcccacatccatcctctcccagcccagaatgttgacttcctgagagagggactgggtctgtcctgctcaccatggtaacctcggcatctagaacagtgcctgccatcacgtggtaggtgctcagtaaatattcttggaactaatgaatgaataattctatccacaagacttcacaatggctcttcatgctgcgatctagctttcaactccaaactggtcttgagatctcacctcagtctctaaccttgacatctaacctcttcacccactctcttacctgaccctaatttttaaaaatgacgtggtcagcttttcagccccctcattccctgtttttaggaggtagtgagtggaagctggaagaataagaaagcttggggagactgcaattgcagtcaggaaagaaaggtactctgccgggaagaacaccccatcttctcctagggaaagattgtggagtcctggggtttgttttgtttttcaattttttgttttaagagacagcgtctcgctctgtcacccaggctggagtgcagtggcgcaatcacagctcactgcaacttcgacctccccggctcaagtgatccccccgcctcagcctcgtgagtagctgggaccacaggcgtgcaccaccacgcccggctaacattttattttttgtggatataaggttgccctatttctttgtggagataaaggctcccctatgttgcccaggctggtctcgaactcctggcttcaagcgatgctttcgcctcggcctccacaaagtgctgggttcacaggtgcgtgagcccgacctgtgtctcgttttgaagctcagggagagggcgctgtgagcaatccctaaaccctttaagagtaaaaagtgcgtgcacctttaagaggacggttagaaaacgcggggcgtggccacaggagaataagttcgcgctgaaccaggagcgtgggataagaccggccccttccggttacgaaaccttagcaagatggcggctccctgggcgtccctgcgcctggtcgcccccatgtggaatgggcgtatcaggggcatccatcgcctgggtgcggcagtggccccagagggcaatcagaagaagaaaaggacaatactccagttcctgaccaactatttctacgatgtggaggctctgagggattacttgctccaaagggagatgtacaaggtgcatgagaaaaatcgatcttacacctggctggagaagcaacatggtccatacggcgcaggtgcctttttcatcctgaagcagggaggcgcagtcaagtttcgagacaaggagtggatcaggccagataagtatggccatttctctcaggagttctggaatttctgtgaagtgcctgtcgaagctgtggatgccggtgactgtgacatcaactacgagggcctggataacctcctccgcctgaaggagctccagtccttgtcgctgcagcgctgctgccacgtggacgactggtgtctcagccgcctctacccactggccgactcgttgcaggagctctcgctggccggttgcccccgcatctccgaacggggcctcgcctgcctccaccacctccagaacctccgcaggctggacatctcggacctccctgccgtgtccaaccctggcctcactcagatattggtggaggagatgctgcccaattgcgaggttgtgggagtcgactgggctgagggcctgaagtcagggccggaggagcagcctcgggacacagccagccctgtccctgcctagcctttagccctgtccccactcacgtggcttctcagcgggctgcatggaatgtctggtagctcaccacacttctggcttccatttgtcttcactcaacgtcagggtgggggagtggtgctggccaatcacaggagagagcgtgagttcccagtatttattcctggctgcccttggctaaaggtcacagctcctgtcaccctgtcaggcagccctttccatgcccctgttcaggcctggggaggtaaaggctcaggctgttagtagccgcagagagccacactcaccttgtcaggagactcttctcaaactgtccttatgtgagtgcactgccatttcttgcagggaccctgactgacacaggggctactactgacactttacagggatagtccccactacccacatgcatgcacccataa

SEQ ID NO: 735305 - DNA, 188385 bp, Homo sapiens
ctccaaggctgagggatgaggagacctgctgaggacccagggccttatctttccatcccactccataggtcccagtattgactgatgctgtcttcacctcctagcctcacttttaaccttctggcacccgcccaccactgtccagttcactattgaagccctgccgtccagtgctgcagagggaaaggatgttcttctactggcctgcaatatttcagaaactattcaagcctattattggcacaaggggaaaacggcagaagggagccctctcattgctggttatataacagacattcaagcaaatatcccaggggccgcatacagtggtcgagagacagtataccccaatggatccctgctgttccaaaacatcaccctggaggacgcaggatcctacaccctacgaaccataaatgccagttacgactctgaccaagcaactggccagctccacgtacaccgtgagtgattcccccatacctctgggtgctggcggtcagttctgcttcacacacatgagattgtcaggcctgggctgtgcctgcatccccctctgcattttgtcccgtgttgagatttgggcatttagtgcaggacacacacatggtaggtaaacttcaacagatcagaattcctttcctgcatccaggccctgcagacactgatggcgggggcgggggggcctcagcagggggaggtcagtctcagccaagcaccccatgccctccccatgaacctgaccctgagaaagaccctggagaactgggtcagggcctggcctgagggcgtcctgggaacctcacaaaagcccagcctcaggactcctgactccgtgtgaccccgggaagcctgtgtcagggctggggtgtggtctcctgggcagggcttactgggagcaaggatttaccagatgtctgcgggctgtggttcctgaagcttctcatcagtgagggctcagctcccagagtctcatctagacaaggacagagcctaccactttccctgggactcagcctggagagggcagggggacaggattactagggcattggccccctgaatgaggagcttaagagatgcccttgggcagtcagtggcccaggggtaggaacagaggggagaaaatgttcctggcagcttcttgtccaccggggatcatgcccaggggtgctctcccatggaggcaaataacagatgctgttgatgtgaacacctcctctgtgccaagcttcatgtcagatcctgtgaataatttaaagttcattcacagacaaagtggcaagcctcagaccattttccatttacatattgtatggaggggaaactgaggcacagagagatacagacaccggccacggtgggcagatcgcagctggcagagtcacatgagggctgtctgcagctgctgccacgtcctctccttcatccctggtgccttactaggtgtctgtggaccttagaacagccactggttcggatgttttcttcttaggtgtctacagctcggagggggagattctggtctggagagttatgagtaaatacagaattaatcagttttttcttaactaaatcacctgcctcaacaatcagtcagtgctggggaagttcaggcctcctcgctcaggtccacaccccgcatctctggacatgaaatggcttcgtgtgttttctgatgtgtgggtatcattccaacaggaggataaaggggaggactttgctttctctccccattcacaccctgcaccagccagggcccagtgtgagacacatactccgtagttctctcatgaaggagggagggaatgaatgaaggaatgatctataacctcttcagagacagagacctggatacaagatcctaggaggttctgggcccaacgtgagacacacactctgtagttctcttatgaaggagggagggattgaatgtaggaatgatctataacctcttcagagacagagatgtggatacaagatcctaggaggttctggccacacctgttttctgtccctctagagcctaagacccatgtctcattcatctggcccgtttctcctaaatctgcccctgggagctgagtctcatctgaccctggggctgcagggctgtgggaaggttttcaggggagggatcaggcttgcgggtagtcccacacgtttgccttacaccctggagctctacctggttctcactatgaatatcccataataatcccccctatcctttctggggagtagaaaaaaagtaaatatttaaaaatatgccagagcatctgttcttcttagcaagttcagatagttattagttagcaggaataaatcgttattttaccagagcctcacctgctgggggtttatgggagcctaactgactgaggggggtgggaaatatccaactccagccccctctagccatcatgtcccacctaaaggagagaaaaaactgagaggcacttgtgacattcacagcccagggcacagactctatccaggaccacagaacccctccctccccccactcaccaccgcatcactgaacgcctgctcacccaagttcctgttgcccagtacatcatgtcctggctttcaacaaaaactacaagacagactagaggcaaaaaaaaaaaaaaaaaaaatgcagttcgaaagacagaacaagcatcagaaccagatgcagatgtggcagggatgtggcagggatgttgaaattatcagaccaggaatttaaaacaactctggggccaggagcggtggctcatgcctgtaatcccagcatttgggaggccgaggcaggcagatcacctgaggtcaggagttcgataccagcctggccaacatggcaaaaccccgtctctactaaaaatacaaaaaattaggcaggcatggtggtgggtgcctgtaatcctagatactcggaaggctgaggcaggagaattgcttgaacctgtgaagcggaggttgcggtgagcctagattgtgccactgcactccagcctgggcaacagagcgagattccatctctaaaacaaacaaacaaaaaacaatactggctaatatgctaaaggctgcaatggaaagcatagacaatgtgcagaacagacggatgctgtgagcagagagatggacaggctaagaaagaataacaacagctactatatctatctatctatctatctatctatctatctatctatctatctatctatatatatgtatatatatgctagagatcaaactcactgtaacacctggatctcagagtggttgtgaggatgtttattaggagattaaagagattaaagcagagttatacacagggcgagagctcaactgatgctatcaactagtattcttatttttttgatgttgttattggcaataaaatcaggaacaatgcagtaaaaatttggttttatcatgtacgagttctgtgaccttccttgacttactgaggtactgtaagtctcagattctaactctgcagatggcggtgatgcccctctccctcaaggtgatgtgaggatgagatgagctgtaggtaggttggtgcccactgtgcctggcacatggaaggcccctgaaaatagtcaatgaacatcatccccgctcatcagcatggagttgacagtgagggctcgctctctgtgacaatcatggaatggaaaagaagaaacaagaggaagactgggcgcagtggctcatgcctgtaatcccagcactttgggaggccgaggcgggcagatcatctgaggtcaggagttcaagaccagcctggacaacatggcgaaatttcatctctactaaaaatataaaaattagcctggcatggtggcacaaacctgtaatcccagctacttgggaggctgaggcaagagaatcgcttgaacttgggagatggaggttgcagtgagccgagattgcgtcagtgcactccagtctgggtgacagagcaagactccatccaaaaaaaaaagaaaaagaaaaaagcaacagagggaagaggtgtgacatgagaggaagaagggatttaaaggtacaggagcagggcgaggtgcaagcacctgtgggagaatgtaggagttggtacatcccagtgtgtcaagtctgagacacagaaaatggtgcaaccgtggagagcaagggagtcagctatgaggacagcccaacagaccacactcaggctctggagcatttccttcctccctgactatgcccctgccctgcaatgccccttatggtttcccttggaacaaacttgggccttgtcccctttgccttcccctttctgcagaaaacaacgtcccaggccttcctgtgggggccgtcgctggcatcgtgactggggtcctggttggggtggctctggtggccgccctggtgtgttttctgcttctctccaggactggaaggtaccgcagcttttccccagcctcctcccacccctaggctgaccccagtcagggaggagggagaccccgccctgtattcagggccaggctttccgcatcctcccaaggaatccttccctctcattccatggctcctcccttgccagctgctgatcctaggctgcctcttcctttatgaatgtggcacagttaaggttgcacccctgagtgctgtcctagttccctaacacagcaaagccacagctgcctggagggaggaagggagggagggagggagggagataagacgggagtgctcagaacctggtaccttctgctgttcattgaatttacccacccagtgaggagggatttgcaggcttgagatccatggtgggggtcctgggcatggtcacgcagtggggagtggcaaagcctggacaggctgggtagggtcagcaccccatcgtgattgatgtccctgaggtgtgagatgggagaacctggacctcaggacctgctgtcctttatgtctcttgccaaggggtggagagagagaggacaaggccattgccccatttcagcatctccaggcctgaaaggagggtctggccatggcagggatactgagttctgggagaatatgatacatgctccttgcctccccatgcccccagctcccccagtgtcctgcacacacagccggccctgctttccctctggggccttgacccttcctctcaggcaaacgcaggtggtctgattccctccctgagtcctcagtccctttcctgggtccctgggtcaatgttctcctcacccggcatctgcctgggggggtccttcctctctggccaggacagacgtgactgcttaaggcctatcctcagctccccgtcctcggccgctcctaccacgaaactgatggagacaggaggccttcactccagtccttgaaaatggagtcccttccttgtcctttattctgcccctaaacctgtgatttctccctgcaccctcatgaataatcctgacctttcctagggccagcatccagcgtgacctcagggagcagccgcccccagcctccacccctggtgagtgtcccttcagcccaggtgtgggagcccctaggcctgccctacggtgtccactcctgccagtcaccccctgggggcctctgaccctttctttggggctgcaaggaggatgtcaggaaacatgacacaggggaccccgactgtcttgttcagactgatctgtgggctctgggtcgtgggtcacctcctcgacctcagctgctcaggtctcccctgggaagaggctccctctccctgattctctgggagctgaggacccctacactctcctgcaggaggggcccaggctctcctcccaccctgctgctcactcctgtctctgtccccaggccatggtccctctcacagatccaccttctcggtaagcctgttccctccccagcccttttctactggggtcccaacagtgcaggctcagggcagggggaccatcaaccccacagcacagcactgacccacctttccccagaacagtcaggtcaaagtgagtgcctccagccaggatccgggcctctctacagggccaggaccacccacgccatgtgctgacccctccccgggaccctctacacctgaggagaaccctggagtccagcaggtgcagaatggacactgggaccatcagtcagaggcccacattaacaagggtgcggggtgggcccagccaggacaggggtcagggtgttgtgtccacactgggaggctgagctcaggggcagagctggtcaatcctgaggggaaatgagtggaagtggaggcagggaagtaagtcctggccgatcagagacaggaaccttccaggctgggcttccgtgaccctccctccctgtcccctgacatctcctctctcccctgcccaggcccctctacccagccccagaacagccactcccatctatgaggtgagtgtgggccatggatgttctggtcccgcaggctccaggggacccaggatctgcccccaccagcacctggctgagctcagattcaggaaaatgcagtgaaaatgagaacaggtggtggtgagcagaggagggaggggcctgggaacagggaccccctgagcacagccaggttcagccccagagaagccctgggtgggcccagagcctgggagatgccagacactgttctgagaaggctacaggggttgaggcctcttctctgtttttacaggaattgctatactctgatgcaaacatttactgccagatcgaccacaaagcagatgtggtctcttaggttcctctgggagctgctcttgtgggttgatggagcgtccccaaagctcccagccctggggacggggaaggacatggagcctgagccagagaaccagctctgagtcctgaggagacacaggcctggggacagggagggatgggagtccctgctgaatatctggagaccctgacaggttgccctgggctctgggtgggccgggacaaaggcctctcatcaccacaggaagcgggggcttgcaaggaaagtgaatgggcctgtggcccacccggggtcaccaggaaaggatctgaataaagaggacccttcctctcattggctctttttctgctcacgggaacttagcagaaactcacctgaaactccgtgtccattctctcccgggtcacacagggaaaatatctccaccttgtctcaaccacagtctctcttccctgggaggcagaaataggggttgggagtcaggctggggtgggccctacacaggaaagggcaagattcacatgagccctgcccagccagccgagcgctcagctgtcctcacactaccccagggaccaaggccatgcacagccccagcctgggtccctctgtgaatgcatgtggggtctcaggagcacagaagatggggccatctgatgtccacaaaaggtgagcaatgcgggagcaaccatgggtggtataggttgcggctgtggcccctacgcagcctccagtgtcctgacccctgctgccctcttcacccaggccctggaggcccagtctatcactgtcctccacaaatgaacttacctgtccccaaatccaggatcctgtgtgcttatacctggccactaggttctcctctgtcccagtggctactgctcaggacatctttatccctggtggggcacagagaggggctgtcagagcaaccaagattaatacagacgcataattcagtccttgagcactacccaggactctggcccctcattgctcatcagttcccactttaccccctggcatggatctcactgagcaagccaactctttacacaggagcatccaggtcagaggtgcaggactcccccatctaaagctcatgcaggctcccatggcgatgggacaacctgtctgctcctctccctggcccacagccctatctcgcctgcagctcctccacacacctgggacagcagttctcagcccttccctgagggcccctggaagggtgatgatctcatataggttcacttgaaccaggtgccaccttcccacaagtgagctggtgcctgcactaaagcacagagccacagttcccaagagtgttctgccactgccacaggtcccaagagtgttctgccactgccacaggttgttcgtcctgagatgagaggtaagaaaacaacccgcaatgggttgttttatatcgggatttgcatcaggatttagctctaaatgacccctgatcccacctgcacacagcgtcagatgagacaaggtgaggcctctttagttttctgttgaggctgtgacaaattaccacaagcttagtgacatagaaacctgaaccaaagtgcccacatggctgtgttctttctagaggctccagggaagagtgcatttcctctccttttccacctcctagaggcctcctgcaaccttggctgtgtcctctttctccatcttcaaagccagcagcacagcatcttgaaactattctgtgccctgcttccatccccacatctccacctcctcccacctccctctctcacttaaaaggaaggagccttgtggttattttggacgcacctgggataaaccacaacaacctccccatctcatgatccttcctttaatctgtaaagtgtcctttaccacgtgacatgtccacagatctggggatgaggatgtacacatctttgagaggcccttgttctgtccatcactcctctcaaggccatcttctcatcatcgttcactacaaactacacatgggcacctggatgggttcatcatgactgtggcgtcagttcctgcattaacatccccagcaccctccagatcctgagagagggagacggagggctctccatgcccctagtacctctccaccttcttcttggtgacatgcttagttgctaagaataacagaaagcggaggtgactgaaagatcacaactcaccggcccttcaatagttcgtggacatcagcaccacggacagtgactcagtgaggctaatttccaggtggcagcagggagcatgcagataggagggaactgcaggaaaagctgcccattctattctatatgagaaagagtgtaagaaagaggaagctattacagggataatgctattcttctctaatccataaattgcgaaacctttgcatgtctggatatcatggtttttagcacatctgctgccactccctgcagggctgattgctgcatccaggatgtggtctcttggggggctcacagcctgctttggcctcatggtgagtctccctgcccctgacactcaggccactgtctctgcctacaacatggtgggaaccttccatgattaacgtctgattctctgtgcctgacctttgaagcacatccatcactcagcctggagcatccgctgagctcagcatcctgctcctccatccccagctgagcccttgaggagatgcttgagaggatctcctgggctcctctgtgagctcctccaggctgagccttgtgcttggtgtcagaggcctttgccatctgcttgttctttccataggcaaataatcctcctcagggacaagtggggcctgaagatctgtctgaatatctatctatctatctatctatctatctatctatctatctatctatcatctatctatatgtatgtatatatgagaatgctttattaggcaaaactgcatactatgaacatgctttaaaatgcaacaggatgagatgtgaagacataaagaacaagtgtgtagtgacacatggctatcagaacacactgaagaatccacaccgcggccgagagcagtggctcacgcctgtagtcccagcacttttggaggctgaggcaggcagatcacttgaggacaggtgttcgagaccagcctgaccaacatggtgaaaccccatctctactaaaaatacaaaaaatttagccgggcctggtggctcatgcctgtagtcctggctgttcgggaggctgaggcaggagaattgcctgaacctgggagacacaagttgcagtgagctgagatcgcaccactgcactccagcctgggagatagagtgaggctccatctaaaaacaaaacaaaacaaaaagaatccacactgcttccccgcttcactttacccagaaaaggaatgttctaggccacttcctcttcagcacacatccccagggaactaaaataggttcacagtcacccccatcttcctcattcccatcacctcttacccacagaggcatctctggtcctacagatccagccctgccttcaagaggcacaggtccaacccatccagtgtccctgctagtcacacacagcactcagggtacaatggagggcttctgtgctttggatgggaacaaaccccacctcacattcccacacctgagaagccaccagggtcctctctgtcctgtcctcacactcaatgtctgtcctgggtcacccttgtcatctctcctggaaataggcatggctcctgacaggtaggattgaggctttgtcttttcaggagtccctcccactctgagcacatgaaactgctcagctccatgcaaccctctctcaccaggggccttgttctctgggtccctgaatacctgggtccatgccatgtacattttaagaaaaatgacagtgactctcaccctgacatcctcacccaaggcacgtgtctgacaagaatcaccaggtgagatacctgtggctccacacacctgaggcttcactgcgcaggggtgtcctcatccctctcctcccacccctagggacagtaagcaccacaggctgccttggaccaccagctccccctcccagacacagcctcagatctatactgacatgctacatggagaggctctgatgaacagcaggtattaggaaatcccaccgaaccaggtgccacttgcggccccactcctcctcatatctgtgactgggacagacacacataacacacctctgttcaccgcccagcccccaaggtcaatcacagtctgcttctcccctagatccactgctccccatgtcttccgtcctcagctgcatcctgggtggcctccttgctgttcttgtaccccagaggcaggttccaacctttgtgatgttgcctgcaatgcccaaactttcccttccccttccccttcccttttcccctcccccttcccctccccttcccctccccacccctatcccttcgtcttcccttgtcttcccttcccttccctataaagccaaacatacccatccacctaccttgtggtcaaagtcatcagcctcctgctccactcagtgttctctgaccctgcatatggaggtggtggcccctcctagaacacccaccactcactgtcagccttgcgtggtaatcacagattttgcaggggttacctgtgttcaggtgtgtcacctgtggaaccagaactcttggaaggactggcagagggagctgcttaggatatctcagggctcctggcatctggtctaccacagggctattaacaacagcacttagggacaaggtggaggatggacggttaagagggtaaatatggatgatgtgtgggcaaagaataggacacaggaacacatgcagtactcaaataattatgccaagaaaggtgaggacatggagatggacattcccatatacttctgatgggactgcagtttagtccctacagcaacattgacctcatcatgtttaacgcgcacacgctctgaccactatcctacttctgaaggcctccctgtgctgtgagctctgagaaggccaagcttgcctgttctgtctctgctaaagccagagaccagccaatagcccagcacagggtacttcataaatacatgttgaaggaatgagctccaggaacagtactccacatggtagagatgtgtgtatgaggatgttcactgcagaaggtcatgtcaatgtgacaagtgacgagcagcctcaaatccagcaacaggggtgtgggtaaaagatcatagtgtagccatgcaatggaaccaatgaaaaaaccacaattagagcaaatccacatgtattaataaaggaggtgccctccatacatgctgcacctaacagaatgttgccaaataagaatgaaaaatgatgatatttgggctgtaaaaactagaagtcagctaaataagaatgcatcgaaagtatttgtgaatgcttacaattttataatgccttggcatccgttttggatggaagttggactttctcataccagaagcagggctcagtcacctttgaaatagtttccagttctccacctccttccagttcctcagtgtgattgatcagatatctgatttatacaactgcctcctggtgacctcctccctatgggacttccggatacagcccgtatgactgccccactgaccccacaccctgcctgctgcagtgaccacctctaattacctggatctcatgtctgcttgcattaaatccaccaattaaaactccctgaggacaatctgtttgaataatattctgtaccctaataaaggccttgacccatgggttccccctctgtcctccccatactgcccctgacctctgtgtgtgtgtgtgggtgtgggtgtatgtgtgtgtgtgtgtgtgtgtcctccagacagggcctgtatcccccaggacctgtaagtaataaatctttattttcatcttatgtctctcgcaatcattggcaagagctctgcatcttaaagatcgcaaatttaagaaattggtgtagtcggcacaatagagtacctcttctgtttagcacaagatatctcggagctgctgaggcttttaacatcctcgccggtgtggctgcctcactggtgaggccgttctgttcagtgcaattcagttgctccactgtgtgctgctgtgttgctgctgtagagtgctgccatgttgttctccccaaattgttaccgagtaggaacctgtaatgtgctcccaaggtggtctaccccatgagaagggggattctccatctagggcaagggctaggtgtgtttctggaatcctaatagggaaggcatccacagagggtgaactccactcctccttagagtgaggagtgacatttcccatttattttccccatggaggtgccatgtattgactttttctttcactgtcccaaggttgagccaaggtgagctatggagaccagggcaagataccatttctgttagcaaagcaaatgggtgacaacgtgtggagaagctgtggttctcctgatggatatagcagagtgccatttagtaaaatcttgtcaggaggctgcccctggttagaccggcagtgtctgtagtcactaaggtggatgcgaattttaggccctgggccatggataatccctgcagacacagccgtggcttcatgtgatggggcaatcccgggctagtggctcccttgtttctgcatttcttgctgtggttgcacaatcaacacctcaggggttgattgggtcaccttggaaagagaaacagctgcctaggaggctggtgcacatggaggccaccctcaattttattctgctaacaagttgtaagattaaaacaacagggggctttgggtaccatcaggaacttgtcaagtaaacatccaaagacagaaagaagaaaaagaaaaagacattaaccgtctagaaatacaagccattttaaagattttgcttaaaagatgcgcttgggctgggagcggtggctcacacctgtaatcccagcactttgggaggccaaggtgggtggatcgactgaggtcaggagttcaagaccagcctgaccaacatggtgaaacctcgcctctactaaaaatacaaaaaattagcagggcatggtggcaggtgcctgtaatcccagctacttgggtggagaatcgcttgaacccgggaggcagagacggcagtgagccaagatcgcaccactgtactccagtctgggcgacagagtgagacttcatctcaaaaaaaaaaaaaaaaaaaaaaaaaagacgggcttgtttcgtcgttgtggagtcatcccagagagaggctactccctagagtcactgaccacctttcctcctccatcttttcctcttatcattctagagacagaaaacaagaatctcagctttaggtggctaacctcaccccccaagaaaagaaactaccactttgattgactacaaatccaagaaaaataaaagagaaactttaaaaagtactgagcaaaccacaggtctagcaaacataatgctagccctaggttacttattcatttacaacaaacccctagatataggaggaaaaaataaaaggtaattaaatatatacacatacaatattttaatataaatatataataaatagttaaattatgtatgtataatatgtaactaaatcaaagtaaaatttcatactttgattctattggaaattcaaaattcatttattaacttatatattaaggaatttatgtaaaaaaagatttttaaaagggcaccaatttgcttttgtgtctctacaacataggatctaatttaactttacatttgctaaatacactaattgacaaatattcatggatttaatcaatactggggctcaaattgtagccacacgtgggaatcccataaatttaaacactctgtccctattatcttgagaagaaaactaaatataaaattgaaaaaaacaggtatgtctcaatttacctgtaactttgcctaaatttcccggagtcatatacccattgctgtaaaacattctctattggacataggtgctctgagacaataaataaaatagaagtgtttttggtacttagacattggcttgacaaaatgggatcccatgaaacctcagttaagatagtgaatacggcccaatgtgagttgaaatggggcctttaaggattaaaacttattacatgaaacctagtaagtaatggggtgattatccatactgcttctccatttcatagcccaattttgacagttgtcaaatctggaaaaaacaaacaaacaaacaaaaaaacccctgggaatctgttgcctcacagagacacaaagtagacatcaaaattgtatatctcagttccagttccaaaatggtggcatagaagcaagctggctttactccttcacacagaaaaccaaaaacaaatatacagcaccaaaattattaccagatatattccagaactcaaatatgaaaatgaaacagttttcagagccacagagaagtgaaaaaaactcccgacagatgacaaaagaatcagatttccccatctgtaatgtccctccctgccccattctgcctggtaccaggtgtgtggaaaattttaccccaactcatggtttctacactgggaaatgtaagatcaatgcgggcaaccagtttctgcacaatcctgggttccctgtccctgccttaacccacaagaagcattgtgagtgcccgaagggagaaatttccctgaggacagtcaaagagtggggaggcaggactaccatctccttccctggaaactctgctgtgtaactcagccaagggagacatgaaatcagactggtgtttcagcagctccatgttgtagtaggtttgtttcacaggtatcctgggcatggacatctagccagctttcccacactgccaggatatcccctttgggacctccctcagttaggaagggcacactctgatcatttactagggccaaggtaaaccctaaaggtaacttagagatgaaaaggaggtagtgacctagcagtaaagaactctaagaaaatctatccaataaaaatcaaaacaagccagacaaagactaaaataaataatgaatccttcaatgtaaagacctggacttacatccacaagaaacagtaagcaggtaaccatgatctccccacatggacaaagtgaggaacaagtgactgatcctgatgagatggtgatgtgtgagctctctaatcaagaattcaaaactgcagttttaaggaaactcaatgatcttcaagaaaacatggaaaagcagttcagaaatttatcagagaaatttaacgaagggattgaaataatttaaagaaaacaaacaggaatcttggaattgagaaatatatttgctgaacaggaaaatttattagagtctctcaacagcagaatggatcagaggaaagaatcaacccaaataagactcccccaaggcataaaataatcgaattctcaaaagtcaagggcaaagagaagattttaaaacagaaagagaaaagaagcaaatggcataaagaagctccaattctgtggcaacagattttcagtggaaatcatacagaccaggagggagtgacatgacattctcaaaatgctgaaaaaatattgacatttgagaatactttatccagtgaagttatccttcaatataaaggagagagaaagtttcctagacaaacaaaagctgagataattcacaccatcagactagtcttcctgtaaatactaaagggtaaatactaaatacttcaatgtgaaagtaaaaaaaaaaacactaacatgcaaaacaaccacaacaacaataacaacatttgaaggtataaaatccactggtgaaattaagtacgtagacaaacccagaatactcaaatagtaattgtggaaagtaatccaatcataactctagcatgagtctcaaaatataaatctatcaaaaacaataatacattttaggaggccaaggttggcagattccttgaggtcaagagttcaagaccagcctggtcaaaatggtgaaaccccatctctaccaaaaaatacaaaaatttgcagggtatggtagcacatgcctgtcgtttcagctatttgggaggctgaggcaggagaattgcttgaacccaggaggtggaggttgcagtgagctgagattgcactactgcactccagcctgggtgacagagggagactctgtcttaaaaaaaaatagctacctgtttggagaaaggtaatataaaatatgtaaatagagacaaagtcaaaatttgcaaaggatgaaattaaagagtagagtttttttggggggttttctgtttctattattttatttgtgatctaagataagttgttaccttttcttctcttgaagatactttgttatatctatgtttttggaagtcttatggtaactgcaacgcaaaaaatctatgatagatccactgaaaataaaaaacaatgacttaaaacatactaccagagacaatcaaccacaaggaagacagtaaaaaatgaagaaaggaagaggggagttacaaaacaaccagaaaacaggcaacaaagtggcagtagtaagttcttacttaaaaatattgaacactgaatataaatggactctattctccaattaaaaggcatagagtggctgaatgctgcctatatgctgcctacaagaaaccacttcatgtaaaaagatacaaatagactgaaagtgaagggggtggaaaaagatatttcatgcaagtggaaaccaaaagagagcaggagtagctatactgatatgagataaactacaaatcaaagactataaaaagagacaaagaaagtcactatgtaatgataaagcgctcagttcagcaagaggagatgccaattataaatatctatgcatccaacacttgagctcccaagtctcccaagtatttaaagcaaacaatagtggatctaaaaggagagatagactgaatacaatattaattaggggactttaacaccctgctctcagcaatggccagatctttcagacagaaaatcaacaaggaaacttcaaagttaaactacacactagatcaaataggcctaactggcatttacgggacatttcactaactatctaactgttacagaattcacattattttcatcagcacatagaacattcttcagaacagaccacatcttaagtcccaaaaccagtcagaataaattcaaaaaagtttatatcacatcaagcatttgttctgaccacaatggaataaaactacaataaatgaataactttctggacacatacaacctaccaagatggaagcatgaaaaggcagaaaaacccaacaaaccaacatgaaactgtaacaaaaggaaaacccaggaccgaatgacttcactgctgaattctaccaaacatttaataagaactaaaaccaattctactcaaaatgctttaaaaaattgaagaggatggaacactttcaaactcattctacaaggtcagcattatcctgataccaaaaccagacaaggacaggacaaaaacaaacaaacaaacaaacaaacaaacaaacaaaaaaacactacaggattgcttgaggccaggagtttgagatcagcctgggcaacatagtcagaaccaatctcttaaaaaaaaaaaaaaagaaaaaaattagccaggcatggtggcatgtgcctttagtcctagctactcgggaggctgaggtgagaggaccaattgagcccaggaggttgaggccgcagtgagccatgtttgtgtcactgtactccagcctggggaacagagcaagatgctctctcaaaaacaaaaagcaagctgggtgtggtggctcctgcctgtaatcacagcactttggaaggctgaggtgggagaactgcttaagcccaggagttcaagaccagtctggacaacatagggggactccatctctcaaaaacaaccaaccaaaacaaagccaaaaaagaacataggccaacatcactaacaaacatagatgtaaaagtcctcaataaaatattaacaaaccatgtttagaaacacatcaaaagagatcattcactatgattaagtgagattcatcccagggatgccagtatggctcaacatatgcaaatcaataaatgtgatccatcacattaaagagaaccaagaacaaaaaccatataatcactccagcaagtgcagaaaaggcatttaataaaagaatgggttgagggagtggagcccatagtcagagcagcagtggtctgggattttggaagtagaaagaagggcagcaccactggccaggaccaccagggaacacccccataggccctgggtgttgtgctccagggagggttccctctggagttattaatcttggtgtccactttgcccagctgcccctcacagggtcagggaggatgaagggaaagcttccttctaatgaaagttcagggactcacagttcctagagcctgtagggagaggaagatcttcgaggaagagcacctgggcattggggcgtttgagaggaagatctatgccaggtccaagtggacaacctgtggactctctctccagggacatacgggtatctgggaatctcctgtagcttaaagaggtaaagacctctccctttagcctgaggactggaggatgctggttcaggtgaatgagtcctgcaggggctggtacaggcctggagggtggtggtgtccagggccttgggttcacccttagcatgattcaggccgggcggtgtttcacatgagcaagagggcctgggttcattgcttcaggacaatggtgaaatctcatggtggaagaaatcttgtccttgccagtgcccagctttcatttggtcttggcccagagtgtcctccctagagaagactcttgtcccttcttcacactgcccttcagggatatgccagccttatgggataagatggggtggagactgtagatgtgggtgggaatctctccacagagtgctccttctctcagcggttgcaccttgtctcagggcttcagcttgaaatctgggatctccaagcccttccctccccagtcctggccaggaccacatgggcagatgcattgtgtgaagtgcatttcatttggggtgtcctctctgcatggcaccctcccgttgattctctttgcgcatgtcagagtgcaggcaccatccacacctcctgctggaggagggacggagctgttgactcctgagagctgatcatgtgttcccaccctcacacacaatcatggtccatcctctgagggacatgtgttgccaccactgtggagatggtgcaactgacagtaacaaacagtaaaatctggtactgaatgggaccttaagccaacaatgacaatgtcattccaaggtgtttcatttttattgattcaatgcaagtcacctgatttcattgactattcacaatagctcgataaagtaaatgcatcatcaccaccactttaaagaggaaaaaggtgcttgggcagtttgtgactactgtggtggctgctgcattgctctctggtaaagccaagtaggtggtgggtgcggcctctgggctgggatgatccaccctcctggtggtggcaggggagccaagctggagccatggcctgtgcagtggtagcagctgaactgaccgctgctgcaggatttgcaagctgttacattttgcgaagccatgaagcacataaaacctcaagtagaacaagtgtttcaaagtctaccaaaatctgccttcagagattattactacagaggtggatatgaacccaaaatgacaaaacgggaagcagcattaatactagataatgaatgaacactagtaatagtagggtaagccctactgccaataaagaaaaaaataagagatgctcattaacatgttatgctcttaaatcacgcagacaaaagagggtctccttatatagtagccacaatcaatgaagctaaagatttactgcaagatcaagctaaaaacagtaggtgtataatgaatttttaacttcatattagtttatgtatatgaatatcaagtttttataataaaatgcctccaaacaaagaatatttgatttagggtttaataacttctaagaggggactcagatgtttcctgtttcacagtcagtctgagagggtcatttttcctggagctgacctgggtggaggcctcacactgatactccccagcatcctctctcctgatggggtttatgctgagcatacagtggccctgggacagctccattctctccatgagtcacagacgctggtcatggaagatccactggataaggttccagagtcatctgtggggcaggtcaggatcacaacatccttttcttctgtgactctggtgttgctgactcagatggggtcggagccactgaccctgtggacaatcagtggaggtgctcaactgaaagtgggctgagggcacgtcttctcctccatccctgggtccttaaggtaactgtggaccccagaccaactgacacaggagctagaaagaaattatttaggaagttagtgagggtaagagcgtccttggcaaggtttcccctttaacaaaaagcagcccaagataattccttttctaacaaagagcagcctgaaaaattgagctacagatgtagatgagcaagatggaagcttgcacaggtgaattccagtaggtgtgccaatagaaaagggctgcctggaagccaggtatgttcaacatggagactccatcctcccttttctccattaccacatgtacagtaaaaaaccaggcaacatggcaccggccaggtagacaatccatctgcatgacaaaagatcagagtggggcagccagcaaatggcacagctggtctaaacaatctttcaccccctgtataaatcagacactgcctcctgaagctcatctataaaaccttctgcatttcactatggaagtggcaacccattttccccaggacccctctctctgtgcagagagctcttctctttctttcccctatgaaacttccactcttaacttcactctgggtgcctgcatcctagttttccatggccatgggacaatgaacctcgagtattaccccagatgaatgatgctgtttcacaatcactggttcagctcccttcttcttagggtttcacagctcggtggggagaataccacgcctcagtggtctggggagtgaggaacaaatgaagaattaatcagattttacttagaacgctatcacctgcctcaaccatcagatccatgttgggaatgtccaggcctcctctcttagatctatacccacttcactggacctgaaatcctgtgtttcccgatgtgttggtgtcactcctatgagaggataaaggagagaactttgctttctctccccactcacaccctgcacaagacagggcccaatatgagacacacactcgctcagtagttctctcatgaaggagggagggagtgacctcgagtgattctgccatctgtagtctgtgtaccctggccagtggctgtatcttcatatgcctcagtttcccctcagtaaaataggacacacaatgagaactaaaaataaaattctaattccccagtgaactgaaaggatggcctcttggccaagcggatcccagagttcctgatcatgacaggatgggaggttacacctcattacagcccctccctttggaagtttagaggtgacaactgactagcattaacgctaaaatcgagatcatgagactgacagaacagactctctgtggccataagataccaaattataaactcaacctaaggtcatgcaggcaagggctaagccacactttcctacatttaaagaataagctatgttctaacacagaattttctttctctctagcggctaaagtaacactagccttcgagataagcaatattgaaatgatcgcggctcatccaccaacactggctaactgacccctgttccaacagccacaactacacttcaattggacaggagactgatttcagtaactttctcctaataagagaccactgagcatggcctggttctgctggtatacagacacggtgcactgagtaccataatgcttgtttcatcttttgatgtataagacctaatttaatacatttaaatctgaattctccaccccaaagtgaacatggggtgcatgtagcatgcatgtttgttgatcacgcatgtgcgtgtacttcctttgtgagtatccatagctccacctataacctgttgaatatgtatacctggccaactcattcagcataaatctatcttccacattcccctcccttgaagtgcctgctattggtctctgctggaggctgcatcttctaccctggggaatggccagcctgcaggctgtaaccctgtgtaagaaataacctggttgggtgcagtggctcacacctgtaatcccagtggtttgggaggttgaagtggtagaatagtttgagctcaggagccagagactagcctgggcagcatagcaagatcctgtctcttaaaaaaattttagggaggagagtgaggatcagaaaaaatacctattggctattatgcttagtacttggatcatgaaataatctgtataccaaacccctgattacatatataacaaacctgcatgcgtatctttgaacctaagataaaagtttgttttaaaaactatctgggtgcagtggtgcatgcctatagttccagctactcgagactgaggtgtgaggagtgcttgagctcgggggattgaggctgcagtgaattatggtcccacctgtgagtagccacttcactcaaacctgggagacagagcaagaaccggtctctaaaaaaaaataaaaatagaaaaataaaatgaaaaatatatgaaataaagtctcctttccaaacgtacagatctccgatttttctgccaacaatgataaatggtcagtggcttgccatgttgtctgtgaattacttttaaaatattcacgatcacctgacctaaaggttggtaccaaggaaccgcctgaatacaccgtctctgattatttgcctccaacagagtgttccctgggcctgatctctggtggacaatgagctgctgggaacatcctctcttctctattcctcccctggggatgctgaccttcccttggagtctcctaagttccccagggcagtcggctaatgtcctagggagcttacctgtcttctccataccaagtctcatgtgaaggacgaggctttgcccttgcccagatgaggctctgggggctgagccctggctggctaccagctgcaagagccatggcccttggacagctggtaaatccttgttcccagtcagccctgcccaagatgcctcaacccagccccggcacaggcttcccagggtcacatggagtcaggatcctgggacaggggactggacaggggtttccagggctgagtttctgaacaggggcttcccaggggtcccctcactccaggatctgacatggtcctacaaggaacgtccatggggaggggacccaggagggggaactgacactgacctccccttactgagcctccccccaaccccatcagactgtccttcctctgtagcaagtgcctgcagggtctggatgcaggaaagaaattctgatctgtggaagtttgtctcccctgtgtgtgtcttgcactaaatgtccaaacccccaaatgggatgtaatgtagagggggacacaggcacagcccaggcctgaaaatcctgtgtgtgtgaagcagaactgacccccaacacccagagctcatgagacatcactgtgtacgtgaaactggccagttacttcttcattcacaagatctgtttttatgacttgtagggtgtaggatcctgtgtcattgttggtgacattctgtatcagcagacatgtattggggtatattgtctctcagcctctgtggcaggtcctggggtaattacttgagttcctagtacatatcctgtaattcccctttgtaccagttgtagccaagcctaaggcagattgtgggtgagtggaagaatctccttgccttctgcagcttcaacagtgacttgggcagtggtaggcaagttccagaaagttaaaagtgaggctaggagtggggagagagcatcagttaatactgggccctatgcattgaggtggaaagatggggccctaggtcctggacaggtctcttcatccctcagccttggagtgtgtgtgtgtgtgtgtgtgtgtgtgtgtgtgtgtgtgtgcgcgcgcgcgcgtgcgtgcgtgtcctactgggccaaggtcagcagcatgacctcccttccttcagtgcctctgaccttggcatttccctgtttggagtccttttccccaggggtctgcctggctccctccctactgccttcaggtcctgctcacattagggcatccttgggagaccccttccctgacacctctagagaccctgggtcttccctttctgacctttcgctgctgtgttccctccagggctcttgtcaatacttgacctcacattctagatacccttgcatgtctgtcttcctccctatgagagcatgagctctgtgagaacagggacttgtgtgatcttggttgcaccccagtgcctgggacaggctgcggactcctgtggatgagctcatgagtgttcccagggcccttcacaacgtgggatttattttccaatggctgaggttgttggctaagagctctgttggagttcaatcaggctggtgggaaaaatattagagatagttatagagatagacacaaatcttcttggaagaccaaaaagtttgcataactttggtaatagatctgactgaaggtggtccctttacctttagttaaacaaattaaagtagtaacaaaggaaggcagagtagtttgtctagccagcttgtttactcatgtgatcttaagactaaccattgatgtgccacaggtgcttaattgctttctacttgggaagtccacaatgtcaattaccctctaacggtgttgactcaagcctttgttaattaatcttactgaataaatatgagtctcactagctgatcaaggccatggtcacaactgtttataggactcagcagggagtctgtaagcggccctgacagactcagctggactggcaaagcaaaatatgtgtgtgtcagtgtacactattcacccgtcccccacagctggtgcccctatatgaggagtgctgccacagagctctgtttagtgtcccttgttttttttcttgagtattaccccaacttaaattgtgattattgtcatctgttttcaacattaactgctcagtgatgattcacttggaaaacattaacaatcgagattgtttcttcactaacaacctcagattatttagattttcctgttgtaatcccttcttcctgtttagtgtccaacagaagccctctgtccctctcaggtccccgttctctccaagaaaccccagccagtctctgtgctccctcctcccatccactcccagggagccctcccctcacctgtgagcagaagcgcctgccagggatgtgcactctgtgaggaggggctgagggaggccccatgggctctgctgtctgctttgtcctcctctgtggagaggagcttgggcttcagaaaataaggaggccagaaagtaaggaacaggctgagaaataatggggatgtgtcgaaaggtcacagatgccaacatctttgtcctatgcaatattatccataaaattacaggtttgagatatgcttaaattttcttctaacatgcattaaaataaacatataacttttaatagttatattaaattgtatttaatataaattaaatgctcttgtcagagctactgtgactgtcagctctgctgtccttcctctctctgtgctaagcctcctcccagggcagaagcacttcccagggccaggggtgggggcggggaaaggtaagtggcaatgaggatctgcacaggtagcctttccgcctcctcccctctcagtcctgcctccttgtcttcttttcctctttttctccaatctacatttcagttccttagaccacgctgtgagaagcaaggcttattgggacccccatcccttaacaggatgacctgtgctccccataagtgacctctgctgtgtctagggattggctctgtcagcacctcacagagagtccctggggcccccaaactcagtgttattttctctatgacacagaaacccctctgggtatgcaaggttttcctcatgttttctaatgtctgggaaggttggatttactcccagcagggaggtcacagagatgtccagggagtggggtcctagaaatggacaaatctagagctaaagcccaggtctacgattttcagttgtttttttctgcagtgctatgtgaccctaatttcctaggagtaactaaaatgcaaacctcagacatttgtagacattttatgatttttctctacagcttgtaccactgttattattatttgctttatgctttttcctaaataaatttactttacaaaacatccttgtcctagtagggtgcaggggctcacgtctgtgatctcagctgcttgagaggttgaggtgggtggattgcttgaggacgggaatttgagacaaaacatctttgtcctatgcaatattatccataaaattacaggtttgagatatgcttaaattttcttctaacatgtattaaaataaacatataacttttaatcatcatattaaattgtatttaatataaatttatatacaatacatttttatataataaattatatatataaatgtatatataatagtttttcttttttgagatggagtctggctctgtctcccaggctggagtgcagtggcacgatctcagctcactgcagcctccgccttctgggttcaaacgattctcctacctcagcctcccgagtagctgggattacaggcgcctgccgccacgcccagctaatttttgtacttttttagtagagatggggtttcgccatgttggccaggctggtctcaaacacctgacttcaggtgatatgccgcctcggcctcccaaagtgctgggattacaggcatgagccaccatgcctggcctatatattttatataattatataaagttttctataataaattttatataataatatataaaatggatatttatttaagataaagttattagttttatatatttacatatatttaggaataaatgtgttactgtgggagcccagtgcccaggcaggtagtcagtacatgatggttgtcattagggttaatactttggaattctggattttttcccaagagagtgtctacgctggaatattgggcttgtggctttctgctgatgtgcatgtgtgaagaagctacttccacttattaggacttgtgtatctgtctcgcagtttcactacctattttctcgtgatgttggtcaagtcgcctaacttttctgtgcctcatttacctaatttgtagaatatgggtaacagtacacaagtgtgagtgtgtatttcccaggactgaccactagagggcgtgaaggcaccggcacttactattacagcaatgggtgtagtagtgctcatggtcgtaaacatcattctcccatgaaaggaaccagggcttcctgggagaaataactgattccagggctggggccggaaagcacaagcggagcctggagcatctcgtgaggccagaaagtaaggagccggctgaaaaataatggagatctgtcgaaaggtcacagatgccaaccagaaggagctttgaatgaccaattttgagacaaaatgagcactataagaaataatgatagtaataaattccaacccataaatacccatgagttcctactaatataaataaataattgaatacataaatatataaggatgaagaaacagctttttcttacagcagaattccaattaatgaatgtagaaggaatgatcaaatagaaaatcactatttggctaacagcacagtcaattgtttgtaggcaagaattatcaatggactttaaatatgaatgggtaaaagtatgatgatgctacaactagtgagtaccaagggggaaaaaaaagtacgttgagaagaaacaggctacttccatattcccaaagtatcacttcaggagctacttattgattataatgggacaaatagtaacttacagtagagaaacctggcaacagagtctctccgaggtacaaaggctctcttcaggaaggaggtaaggggaaggaagaagaaaacactgtcctgcctcaattatttgctttccccattctcaagtgtacttcatagacattcaaagatatgtgttgatagtgtccacgatccacatggctctattatagtcatttattcacacatacattcagtgaggctttgagtgcctaatgtgtgcctgatatttgctagatggtggatgctgagaagatcaggtgtgctgctgtctctagggtgactgaatccacctgccccactttacagatgtggaaattaaagtgaaaaggatttataggattagttcactgtcacaaggtcactagccttaaagttacaggagtaaagcaagtttcctgacttgctagattttctgctgcaggtgctgacaatggtgagctccaataggagagaggacactcagagtgaagtgggagccctgaacaccctggattagccaagaggacatgccgggtccagctgtgaccgcacaaaggaccattggggatatttgtattctctttttcacttagagcttgaaatgaggaaaactaagtgcagaaaaccaagagtggaagatttttcacaaagcactggtaacatgcatcagaaaaccctgtgctgatgtctgtcacggtgtttctcactgaacggtaatagtctggctttgagtgtgttccctctacagcctggagttctgcgaggcagggaccaggtgtgattcatctttgtctctccagtgacagtacacagcaggctctgataaatatttcttacaaaataaaatggaataaaaagtagacatctgcacaggtgtgggatgactgagcagcagcagaagcaggaaaagtcagcgtccccagatcagctgatgtggtgttcggattctagataggggtgaggtgccaggatggggatgggggtcctgtggctctgctgccctgggggacacccctaggtttcacagtgcctgctgtggttgctgcactttgcttccccatgggaaagtgatcagagggtgtggggcttcaggtgaccccatgtgggaaatggccaagggaaggtggggtgggcggcacatggttttttttaaccaatatttgaaggtaggttgtatgaaaaggtgttaggcttatttcagcttatggggagtaggacagggattggtgagtgtgtatcaggtatattttggctcaggatggaaaagaactgtcacagtaacataaggtcttttgggaaattacatgtttactggcagagttcaggccagggctgggtgtctgaaaatacctgtcagggtcacttttatggttacaagggcagagcttggcttggaaccaggtttcttactaataccacatattaagtattataaaaactgtcctttgcaataggacattgctctatgatgcaggttgaggtccctctgtttaagtaattgtgggtggctgtgattctctcatctagtctgcgacttggacttcacctccatctgcagtccctctcctttgctgttgacactggtcagagttaagcgcatttactgacgatggtcacagggtggcagcactgcctctctggtattttctaaaacctcttcctggaactgagccagtctaagaggatgtcatgactaagaaaagggcactaatgaggtgaacagataattttttttttcttgtttctcctgtgaagtaacagagtggaggtgagcatggaataattgccttttagaaatggaagacaatggagagaagtgtttcgcaaaccttaatgtgttcacagatcccacacagatctttttattcaatacagattctgatttttctggtgaggcctgagattgtgcatgtctaaggagcttttggatgatgccattgctgctggttggcggaccacactttgagtagcaaggctcgaagatcatttagaggttaattctcactgcatctaatttatggatgaaaacaaaccaaggtccagagagagcatatacagcttgcctaacaaagccattccctaagtgcctgacttcttgcatttaaacccagggcttcagcctttgtccagttctcactccacacatcacacggtttgttcactgttgtgaacgacagttgtggcagcatctctttagtttaggaatccagagccccaatttcactaccctctttggtcttggctcatgctgtgacttcgaatagttttgcccttacttaaaatcttcagtggctcttttgtaatcacaagatcaagttcgaatatctctgtctagtgttcatggctttataacatatggtatctctttagtaaccttacctaacttccctgttttaaaattgtctcttgctgccatagccctccttgctccttcctgctccctaacaaactgtgttcacttctctctcagtggtagtgatgatggcatggcctctgatgttagactcatgtaacttctaatcccagatccaccaccaacattggcaagttgattcatctttctgaggataagcatcctcctctgaaataaacttagatggcggttgagaggggtaaataaaataacacacaaacccactctcatccctgagaccctcttcaaaactagcatataaaaatagctatttgaagaggttcagtgaaattcaaggtaacacagagaaggaattcagaatcctatcagataaatttaatagactgaaataatttttaaaaatcaggcagaaattctgtagctgaaaaattcaattgacaaaccgaagaatgcactaaatctttcaacagcagaattgatcaagcagaagaaagaatttgtgagcttgaagagataatatatgaaaactcagagtcagagagacaaaagaaaaaagaattaaaagaataatgcatgcctacaaggtttgattattaagctactcaaagagatacaagagaagggtgaaaaccaacataaagaaatgtaaaaaacaatcagaatataaatgaaaaattttctaaaatgctagctagtttttttttgagacaggctcttactctcatcacccatgctggagtgaagtggcacagtcatggctcactgcaggctcaacttcctgggctcagatgattctcccacattagccttccaagtagctaggactaaaggcgtgtgccaccaggccaggctaattttttgtatttttagtagagatggggttttgccatcttacccagggctggtcttgaactcctgggctcaagtgatccaggagattcactgccaaaaaggatataaccaagtcatatagtcataggttatctaaagtcaatgtgaaggcaagaattctaagagcagtgagacaaaagcatcaattaacttataaaggaaaacctatcagtctaacaccagatttctcatcagaaaccttacaaaccagaaggtattggggtcctaatcttttggcttcttaaacagaatagctctcagccaagaatcttgtgtagagtgaaattatatttcaaaatgaaagagagaaatacagtctttttcaggcaagcaaatgcttcaggatttgtcacggctagaccatcctacatggaatgttaaagggacttctaaatcacaaaacaaaagatttaaatagaacagaatagaacctcttgaaaccaaaaaattcaaatggcctataaaacaataacacaataagaaaacaaagtagataacgatcaacatgatgactggaacaaatattaacattgaatgtaaatgacctaacactccacttaaaagacacagattggcaagataaataaaaaatcacaaaccaaatatcagctgtcttcaagagactcacttaacatgtaaggattcttatagactcaaggtaaagagatgataaaagatattccatgcaaatggaaaccataagtgagaaggaatagctatccttatatcatataaaacagactttaagcaacaacagtaagaaaaagacaaataaggcaactatataatgataaaaggatcaatcaaacaagaagatattacaatcctaaatatatatgcacctaactttggagctcccacattcataaaacggttatgatgagacctaagaaaaaagatcaacacaaaacagtgagggtgtcctgggttttctttttattggacagcagtgtactagcctatcactttcccagtcaggggatttttggtctccccattcccctaccatgggttcatgccaaagtccatattttttattagtgtttggaattggattttttttttttgaggtggagtctcgctctgttgcctaggctggagtgtagtggcacgatctcggctcactaacctctgcctcctgggttcaagcaattcttctgcctcagcctcctgagtacctgggactacaggtgcatgccaccacacccagctaatttttgtatttttagtagaaacgagatttcaccatattgtccaggcttgtatagaactcctgacctcatgtgacagggaaacaggcactcagtgaacttcatgcgattgaggagttaatgataatgagagaagggctgtgaggggacagcactggggacaccagagcctgtgacgggctgagttgctgtgccttgggagatgcccttttgactgagccctgggaaggagggggtgtgggggcaggagctgcctgcagagggagtggcctcaggtgggcggccacctggctgcagggaagaggtgacagagttcgtgtgcagagcttggagggtgaggaggaggtgggttgaggtgaccttggtgagggtgaaccatggggggctgtgggccctgctgagggaggccagccagccctggacctacagggtggtttggtcttttttgtcccattcccagcatccactgagtggtgaaactctgcaggccagggaccatcccactggccagaaggagcgcacagtaggtgcccactcagtgcatgttgggctggacagaacctcactctgccccctgcccccagctttgggagctgcagcaaggtccctccccctagggatctccatgcctctgtctctgaggggtgagatggggagacttcaaagggccatctcagagtgtgggggatagagacgcagaagtgtgggggatagagggaggcctgggctctagacccaaaggaccttacacacctcctgagtcttttcaaatggtttcttctgttactttaaaaatgatgtaagtcatcatatttattgtaaatcccaggaatctaatcatgcgtaaaataaggtgtcttatccttgaccccaccccttccccaattaaatttccaggatgttaccactgtttgcagttggtgtgaatctctctttaataatactctgtttatctcacttgtcgttttacgccaaaatacccattgaattatattattgctgaagaccattcttttttttttttttttttttgagatggattcttgctctgttgcccaggctggagtgcaatggtgtgatctcggctcactgcaacctctgcctcctgggttcaagtgattctcctgcctcagcctcctgagtttctgggattacaggtgcacaccaccacacctggctaatttttgtatttttagtaaagacagggtttcaccatgttggtcaggctggtctcgaactcctgacctcatgatccaccctccttggcctcccaaaatgctgggattacaggcatgagccaccacacctgcccagaccattctgttctactgaatcatgtgtggtgggcacctcttatatcaatacatatggattttatcttgtgtttgttattggctcccctttttctcattgcatggctacactcaatgctttgtccacacccctgttcctgggttggaatcttgtgacagaaaatgaagtaacaaaggctaaagctttctaaagtggagtcaggagattgcaagacaattgcactttcaccagcaagagctcaaaccacagaatgttccaatagatttggataaacagctgaagtcagtattcaccagccttcaacatctcaactaggagaaccctaaaattaactaagcacatagaatggaatggacttgtgatttaggattccttctcagccaatgagctgcttctgaaaacaactttttgtggaaattacctgtaaagaaaaccctctcctgtgcttgtcttacagaacactagtcagggctgccctgattcagtggacccgaattgctattatttgtttcctaaacatatggtattttctgtgaccttcatctcaatcttttttttaagttactgggctgtttcccagttttcataatgacgagacattctgcagtgtttcatacacatgtcttttccccatgtggagtattgatccaggagctcattcagtcaacgcatgtttatgaagcatcctgtgccaggctgtgggctggtcactgtcttcagcagagagaggacaggcacagtcttgccttcacagagctcacagctcagggaggctcttagaagtgggatactggtcggagcatgtgcacattaaacatgatgaggtcaaggttgctatagggactaaaccacagtcccaccaagatcgcattgagttcctgtggtagaccagaggtcagggcccctaagatgtcctgagcagctccctctgctcagaagttttggttccacaggtgacacacctgagcacaggtgacccctgcagaacctgtgattaccacccaaagccaagagtgagtggtgggtgttctaggaggaaccgtcacctccatgggcagggttggggaagactgaggggagcaggtggctgatgactttggccagaaggtagggggatgggcaggtgtgcgctcatagggaagggaagagaagggagggcattgcaggcaacaacacaaaggttggaacctgccttcatggactgagaaaagcagggagtccacccaggctgcagctggggagggaagacatggggagcagtgggtctaggggagaagcagactgcgattgaccttggggactgggcagtgagcagaggtgtgttatgtgtgtctgtccccatcatagatatgaggaggggtgaggccgcgggtggcacctgggtcggtgggatttcatagtgcctgctgttccctagagcctctctgtatagagggtcagaatagatctgaggctgtggtctgggggaaggggctggtggtgcttaccatctctaggggtgggaggagagggatgaggatgcccctgagcagtgaagcctcaaggtgtgtggagccacagttgtctctcattagacatgtgttttgcgtgaggatgccagggcctggtggttattactgttgtcaagtttgcatgacaaggacccaggtatccagggatccagagcacagggcccctggtgaggggatgaggctcagatggggctgaccaggttcatgtggtcagagtgggagggactgatggagagacagagcctcaacccctcctgtcaggagctgtggctatgtccaggagagatgacaaggatgacccaggacattgagtgagtcattgagacattgaaggtgaggacagggcagagaggaccctggtgactgctgaaatgtaggatgtgaggagggctctgacccatgcaagttacaggacctccccacccccgagcccacagatgacccttaaattgggcatcctgagtgctgtgtgtgcccagcagggacactggataggctggacctgagtctctgtaagggcagcgctggtctgtaggaccagagtcttctctgtgggtgtgacgtgggcaggaattagcaagatgggggtgacaaggcttggcttggaggatctggtacagaagcccatgggcttggtcagctcagcttctcaggggctcagctggggctggaggagcaggatgctgtgctcagggcatgctccaggcagcgtgatgtgtgtggttccagggtcaggcacgggggtcaaaaattaaccatgaaaagttcccaccttctgtaggcagagaaaatggcctgattgtcagggtcagggagacttaccatgtggccaaagcaggctctcagcctcccagagaccacaccctgggtgcagcactcagctctgcagggtatggcaatagatgtgccaagaaccccaacatccagatgcatgcaaaaattttgcgatatataaaatagagcagatcaagtttccctgcaataacgttgttcctggttgtgtctttttcttgtaaactagacatggacatctttccagcagtctgttctcatctgccaccttcctgctgcagcacctcagaatgaacattcctgagacactgtccgtggtgctgacgaccaagagctatggaacagagtgtgatgtagaatcttctagttacctctgctctcctttcacttttaacaacagagcatcattaacaatgagaaggtggagaggtgttcaggatcttgaagtgacttctgtcttgctctcccataaccctgaagctgctgtagacattattgcagaaactgacaccacagtcaggatggccttgtccaggagcccatgtgcagtttgtagtgagcaaggatgagaaaatggtcttgaaaggggtgatggacagaacaggggcttttcaaaaatgtcacatcatcacccccagcatccgtgaatctgtcacatggtaagagaccttacagattaaatgaaggattatgagtttggaagattattgtagtttatccagatgggtccaacataatcacagaatcccttccttacaaatgagagagggaggtgggagagtcagagaaggaggaggagatgtggggatagatgcagaagacagagcggtgtcaagatgctgcactgctggctttgaagatggagaaagaggacacagccaaggatgcaggaggcctctaggaggtggaaaaggagaggaaacgcactctgccctggagcctccagaaagaacgcagccatgtgggcaccttggttcaagtttctgtgtcacttagcttgtgggaatttgtcacagcctcaacaggaacctacagaggagtcaccttgtgtgcaggtgggatccagggtcatttacagctaaatcctgatgtaaatattgcaggttgcttttcctacttcctatctcatggccaacaaccctggacaatggcagaacacccttggaaaccacggctctgtgctttagtggagggaccagcttgtttgtgggaaggtagcacctggtccaagtgaacctacatgagatcgttactctccccagggccctcagggaagggctgagaacagctggcccaggtgtgtggaggagctgcaggtgaggcagggctggaggggcctgtgggtccaggtagaggggcagacaggttgtcccatcgccatgggagcctgcacgagctttaggttggggaaccctgctcctctgacctggacgctcctgtgtggagaggaggcttgctcagtgagatccacgccagggggtaaattgggaactgatgggaaatgaggggctagagtcctgggtagtgcctgggaggaccttgctcaaggactgaattcttggtctgttcccaccttggttactctgacaacccctctctgtgtcccacggggataaagatctcctgagcagtggccattgggacagaggagaacctggtggccagagctaagcatccaggatcctggatttggggacaggcaagctcattgctgggggacagtgatagatacggcctccagggcctgggtgaagagagcaggagggctcaggacactggaggctgtgtggaggtcacacccacgatctgtaccacccatggatgctcctgcattgctcacctttgtgtggacatcagatggccccaacttttgcactcctgagacatctcatgcattcacagagggacccaggctggggctgtgcatggccttggtctctagggtagtgtgaggacagctgagcactcagctggctgggcaggactcctgcgaatcctgccctttcctgtgtagggtccaccccagcctgactcctaaccccctactcctgtctttccagggaagagagactggggttgagataaggtggagatatttttcctgtgtgacccaggagagaatggacatggagtttcaggtgagtttctgctaagttcccatgagcagaaaaagagccaatgagaggaagtttcccctttattcagatcctttccaggtgaccccgggtgggccataggcccattcactttccctgcaagcccccgcttcctgtggtgatgggaagccttcgccttggcccacccagagcccggggcagtctgttgaggtctctatatattcagcagggacccccatcccttcctgtccccaggcctgtgtctcctcaggactcagagctggttctctggctcaggctccatgtccttccccatccccagggctgggggcttcagggacgctccatcaacccacaggagcagctcccagaggaacctaagaagccacatctgctttgtggtcgatccagcagtaaatgtttgtgtcagagtgtagcaattccagtaaaaacagagaagaggtcttgacccctgaggccttctcagaacagggtctggcatctctctctgggcccacccagggctactctgggactgaacctggctgtgctcagggggttcctgctcccaggcccctccctcctctgctcaccacctcctgttattttcactgcagtttcctgaacttcagctcagccagatgccagtggggacagatcctgggtctccctggggcccaagggaccagaatatctgtggcccccactcacctcatagatgagagcagctgccctggtgctgggtaggggaatctgggcaggggagagaggggtgtcaggggacagggaaggattcctgctgtgtaggaattccagggctctcctcaggtgatggagggtcccagggtggggttagcacagggagtggatgatcctggccctgaacagaggcccagctcatggccagggcaggtctaaccttatccaagtcattctgggtagggtgggtttgtgctggggattgacagtccccctgccctgagcctgcacagctggggccccagtggaaatgggattgggaacggacagtcttacctaggagatggagctgtcagagggtccatggcctggggacagagacaaaagtgagcacgagagtgttaggatagctgggcccctcctgcaagagtgtgtgggggtcctcagttcttagagaattggggagagggagcctttctcaggttattttaggggtcaagtaagcaagtgaggttgaggaagtgacccatgacccagagcccggaggttagggctgacccggccagttggggtttcctgtgtgatgttttatgggatcctctttgcagccccagggatagggtcagaggcccctgggtgtaactggcaggagtggacaacttggggctggcttagtagttcccagccacacccagactgaagggacactcaccgggggtggaggctgggggctgctgctccctgaagtcactctgatcgctggccctaggaaaggtcagggttatttgtgaaggtgcaaggttaaaagtcacaaattggagttaaaataggggaccaggaaaggagcctatttccaagaggggtatggagacctcctttctttatggagttctgtggtaggaggggcccaggtgaggggagttgaggaaaggccttacaaagccacatctgtcctggccagaggggaaggactctcaggcagatgctgggccaggagaacattgatccagtgacacaggaaagggactgaggacccagggaaggaatcagaccaccaggggttgcctgagaggaagggtcaaggcaccagggggaaagcagggccaggcacatgtgcaggacactgaggggactgcatgcatcttggattctcctggaactcagtgtccctgctgtgaccagacactccactcagggctggagatgctgaaatgggacaatgatcttgtcttctgtctctgccctttggcaagagacataaacgacattccaggatatgccatattggggccccggttctcccttctcacagctcagtgtctgcagttaccatgtcagtcaaaggggtgctgaccccacccagcccgtccaggctgttccagtctccactatgtgataatgcccaggatcccccctcagatgccctctcactgggtggatggattcagtgaacagggggaggtaccaggtattgagcaccgctcccccctgctccaggcagctgtggctttgctgtgctaggaaactaggaccatgctcaggggcatggccttaattggactgaattcactgaggacaaagctgttgaggaagcagcccagggtcagcagctggtgaggaaggtgccatggaatgagagggaaggatccctggggagtcgggaggctggggagagcctggcactgaatacaagacagggtctccttccttctcgcctggggtcagcgtgaaggatgggagcagaatggggaaaagctgtggtacctgccagtttttcggaggagcaggaaacacacaagtgcagccaccagaagactcccaaccaggaccccgatcaggatgcctagagtgttgtcatctgctgaaagaagaaggcaaaggggatgaggtccaaatctgttccagggggaaccatgaggggccttgcagggcaggggcatggtcagggaggaaggaaatgccatggagcctgagtgtggtctgttgtgctgtcctcatagctggctcccttgctctccgtggttgcaccattttctgtgtcttaggcttgaattactgggatgcatcaactcctacattctcccacaggaagcctgcacctcatcctgctcctgtgttttttagtccctccttcctctcacatcactcctcttccccctgtttctttttttccatcccatggcagtcgtaaagggcaggcccttgctgccaactcaatgctgatgagcagggatgatgttcattgactgttttcaggggccttccacatggaaggcacagtgggaatcaatctacctgcagcttttctcaccctcccattgccttgagggagaagggtatgtgatattgtgaaatacgtatttggtgttcatcaccattgatatggttaggctctgtatccccacccaaatctcaccttgaattgtaataatccccatgtgttatgggagggaccttgtgggaggtaattgaatcatgagggtgggttttttccatcctgttcttgtgatagtgaataagtctcaggagatcagatggtttcataaagggaagcttccctacacatgtcctcttgcctgctgccatgtaagacatgcctttcaccttccatcatgattgtgagacctctccagccatgtggaattgtgaatcaattaaacctctttcttcatacattaccaagtctcaggtatgtcttcattagcagtgtgagaatggactaatacagtaaattggtaccagctagtggagtgctgctataaagatacctgaaaatgtggaagtgactttggaactgggtaacaggcagaggttggaacagtttggagggctcagaagaagacacaggaaaaaagtttgaaacttcctagagacttgttgaatggttttgattaaaacgctgatagtgatatggacaataaagtccaagctgaggtggtctcagacagagatgaggaacttcttgggaactggaacaaaggtgactcttgttatactctagaaaagagattggtggtattttgcccctgccctagagatctgcagaactttgaacttgagggaaatgatttagggcaactggtggaaaaaaaattctaagcagcaaagtgttcaagatgtgacttgggtactgttaaaaacactcagttttatgtatttacaaaggtatggtttggaattggaacttatgtttaaaagggaagcagagcataaaagtttggaaaatttgcagcctgatgatgcaatagaaaagaaaaatccattttctgaggagaaattcaagccagctgcagaaatgtgcataaacaatgaagagcaaaatgttaatccccaagacaatggcaaaaatgtctccagggcatgtcagagaccttcctggaagccccttccatcacaggactggaggcctaggaggaaaaaatgtttcctgggccaggcccagggctcccctgctgtgtgcggcctagagacttggtgccctgcatcccagccactccagccatggctaaagagggccaaggtacagctggggccatggcttcagagggtgcaagccccaaaccttggcagcttccatgtggtgttgagcctgcaggtgcacagaagtcaaggattgaggtttgggaaccttcgcctagatttcagaggatgtatgaaaatgcttggatgtccaggtgaaagtttgctgcagaagcagagccctcatggagaacctctgctagggaagtgttgaagggaaatgtggggttggaaccccgacacagagtccctactggggcactgcctaatggagctgtgagaagaagaccacaatcctccagaccccagaatggtagatccactaacagcttgcaccatgcacctagaaaagctgcagacactcaacgccagcctatgaaagcagccaggagtggggctgtaccctgcaaagccacaggggtggagcccaaggctatgggagttcagctcttgcatcagtgtgacctggatgtgagacatggatacaaaggagatcatttcagagcattaagatttggctgccctgctggattttgggcttgcatggggcctgtagcccctttgttttggccagtttctcccatttggaatgggtgtatttacccagtgcctgtacacccattatatctaggaagtaactaagcttgcttttgattttacaggcttataggtggaagggacttgccttgtctcagatgaaactttggacttggacttttgggttaatgctggaatgagttaagactttggggaactgttggaaggcatgattagttttgaaatgtgaggacatgagatttgggaggggtcgggtggaatgacatggtttggctcttcttcacccaaatatcaccttgaattttaataatccccacgtgttgggggaaggacccagtgggaggtaactgaatcatgggggtggattcttcccatgctgttctcatgatagtgaataagtctcacaagatctgatggttttagaaaggggagttcctctacacatgccctcttgcctgccgccatgtaagacatgccttttgccttctgccatgatttcaaggcctccccagctatgtggaactgtaagtcaattaaacctcatttttaaaaaaattacccagtctcaggtatgtctttatcagcagccaagaccagctcggtcgcggagatcctaacccagcagtgctagaggaattaaagacacacatagaaatatagaggtgtgaagtgggaaatcagggttctcacaggcttcagagctgagagccccaaacagagatttacccacatatttaataacagcaaaccagtcattagcattgtttctatagatattaaattaactaaaagtatcccttatgggaaaccaagggatgggccgaattaaaggaataggttgggctagttaactgcaacaggaacacgcccttaagatgcagattgctcatgctattgtttgtggcttaagaacgcctttaagcggttttccaccctgggtgggacaggtattccttgccctcattcctgtaaacccataaccttccagcttgggcattagggccattatgaacatgttacagtgctgcagagattttgtttatgaccagttttggggccagtttatggccagattttggggggcttgctcccaacagactaatacacccattttctggtatgtgactctaaagtccttagaatcttcaaagtgatgtctttttcaagctaataattgactgatgactggcagcccctaggcaacttcagaatgaggctggtcactgacccaggtaggattagagggttgggactttcagcctcacccctaatccctggggagggacctggagtttgaattaatcaccaatgaccaatgaatcaattaatggccaatgattgaatcaattaatggccaatgattaaatcaatcatatctatgtcatgaaccccaaaaggactgggtttgaagagctgaacccatggaagtttctggagtgtggtgcatctggggagggcatggaagctccacaccccttcccacatgccatgctctgtgcatctcttcatctgcatcctttgtaaagtcctttattacaaaccggtaagcctaagtatgtgtttccctgagtcctgagagctgtttgagcaaactaatccaacccaaacagggagtcatggaaacctcaatgtgaagccagtcataagaagctctggaggcccagacttgtgactggtgggaaggtggtggcaattttgtgggactgagccctctgctgatatgtccaggtagatagtgtcaggatggaattggaggacacctagctgatgtacggtgcagaactgattggctgctgggtgtgtgggagaaacccccccgcatcacatttggtcacagaagtgtgtctgtgttgatgattgttattgtggagtgagagcagaggaaaaacacagtttgagtttttccaaacagggtggaatcccatctgccaatttagaatctgaaacttatagtttcagtacttcaattaagattgaagtacttcaattcagtacttcaattaagattcagtacttcaattaagattcagtacttcaattaagattacagaactggtaagtgaaagtgatacaacaaaaatgtaaccaaagtctgctcaacttaacagctaataacaacaaagttcataaaaataataccagtcgatattgatagcactgattgagccctggctctgtgcatgaccttgttaagggctttaatcgcattaatctctgaataaatatcctcacaaccaccctgagatccaggtgtttgtaacaattctacagatgaggaaactgaggcccaggaggttgagtgtcttgcccaaggtcaaatacctggtacctattgtaaccaggatgataactggatgagtctaatccctgagttcttacccacattgctccccaggctctgaaggaatctcatccttctcattccgtgtatcattttacaccccccctccctcctaggaaaatatacaaggaaaggagtgagaggggccgagggtcactcacattttacagtcagcttgagggggtcgctcctgttggagctgactgggttggagacctcacactgatactccccagcgtcctcctgcctgatggggtctatggtgagcatatggttaaaccaggacagcttcatcctcttcgtgacctgcagacgctggttgttgaaaatccactggaaagaggttccagtgttatttgtgtggcaggtcaggaccacggagcccttctctgtgactgtggtgctgctggcttggatggagggctgagccactgactctgtggatagagtgaccaacagaaagtgtcttggggccatgctgcatcctcagagatctcagagtcaaatttagaacattctcctgtgaataaaggagaaagatgaaggacagggaggagcagagagaaccagagacacccatagcagcgagcagtagggactacagtgacctcagagaccccagggaccaggaggacccagctgcctcagaccaggaccagggagccctgaaaaccctcccacagatgagcggccccagagtcacatgagatgcaatacctggggtggctttaggagcaggcagtcagagaaatggaacatgggtctcagcccctaagggacaaggaagaggtgtggccagctcctcctaggatcctacatccaggacccagtctgtaaagaggttatgattattcctttcttttttcattaattccctccctccttcatcagagaactactgagtgtgtgtctcagttgggccttgtgcaggtacagggtgtagtgggaagagaaagctgagtcctttccttcatcctcccatgggagtgacatcaacaaatcaagaaattcatgatttcacgtccagtgagggaagaaatgtggatctgatgggagaggcttggacaatcctggcattgagtctgatagttgagacaggtgatttcgttctaagtaaaaactgactaattctccatttgcccgtcattcctcagaccagaatctccctctctgagctgaggatgcccaagaagaaaggagctgaaccaacatctggtcctggggtccacagatgccccacggtggtggccacgaccagattctgggctgcagacacacggtggtgtgacgttgagcactgacagcctgtgtgatgctgatgcaatttctctttaataaaatggggtaaatgtcaatggtccctggcttgccatcctctctgtaaattaacattaaaatatttacaattacctgacctaaagcttggcacagaatagctccaaataaacatcatctattattattttactccaaaaaaaaaaaaaaaagagttctctgggcctgattcctggtggagaaggagcggtccagagtgtcttttctctgctttccctcctcctgaggacagtgcacttcccgggacatcttttaagtttcccatccagtttaatggcctgggaagtttgtttgtctgtcctctccactctgactctcaggtgaaagatgaggctctgcccttgcccagatggggctctgggggctgagccctgcctggtgaccagctctaggaaccacggccctgggacagctggtaaatcgttgctcacaatcagccctgcccaggaagccacaacccagccctggcacaggctccccagggtcatctggagtcaggatcttgggacaggggcctggggcaggggcttgaagggctgagcttctctcagaggatcctcaggccaggccctgactgagtcctataagatctttctcaggtcatgtctatgaggaggaggccaagcggggttggactgagactgattttcccccgctgcatctcccgcatcagactatccttcttgctgtagggaatttccacggagtccggataagggaaaggaattctgatctgttatagtttgtctcccctgggtgtgtcctgcactaaatgcccaaaccccaacatgggacgtaatgcagagggggatgcaggcacagcccaggcctgacaatcctgcgtatgtgaagcagaactgacccccaacacccagaggcacggaggaatcactcaccgtatacacggagatggtgagatgcctgttcaatctgagaatttctgtatgtgacttgtagggtgtagtatcccgtgtcctctagggtgacgttctggaaatgcagatctccactgggtgatattgtctctcgaccgctgtatgcaggccctggagtcctaacgtgagtgtctattacatatgctgcgattagctggttgggctccaccgttttccctttgtaccagccatagctgtaaagattctcgggcagataaaccacagagagatgaacattctccccttcagcaacttcaaagggcgctgatgcaataaagagccaggcagtggtgggtgcgttccagaaagttaaaagtgaggctaggaaagggagagaatatcagtcaatatttgacctatgcattggcatggaaagacggggtcctgggtgcaggtctcttcacccctcagccttagagggtgtgtgtgtgtgtgtgtgtcctactgggtcaaagtcagcagcatgaccctcattccttcagtacctctgaccttggcatttccttgtgtgaaccctctttcccaggggtctgcatggttccctccccactgccttcagttcctactcacacaagggaatccctgggagacttctttcgtgaagcctcctctagagaccctgggtcttccctttctgacctttcccagctctgttccctccagggctcttgtcagcacctgacctcacattctagatctctttgggtgtctgtcttcccccccatgagattgtgagctctgtgagggcatggacttgagtgatgttagttgcaccccagtgcctgggacaggctgcagactcctgtggatgagttcatgagcgttcccagggccttccatatcctggggtttatttgctaatgtctgaggttggcagatgaagacagagtttcatgccctggtggtgtttttatttaaattgtcactgtgatatagttttactatcattttcaaaatgtagtggccactgacaatgaacttgaaaacatggaccaactgagattgttttgccccttggcaattccagttcacttagattttttggttctccttagacgctctctcccctgagtctctaacaaaagccctctgtctcctctcagagccccatcctccccaggagaccccagccagtctctgtgctccctcctcccacccactcccagggagtcctcccctcacctgtgagcaagagcccctgccaggggatgcattctctgtggggacaagctgaggggggccccatggtctctgctgcctgctctgtcctcctctgtggagaggagcttgggctccaggaacgctctagacagggttactgtgactgttgtctctgctgtccttccttcctctatgctgagcttcctctcaggcaggagcacttcccgtttatgggcaagggcggggctctgcctacaatgtctctctgtcccctcccctctcagtcctgcctcccttgtccctcctttctccttcctttttgcctatatttggttccctaggcaaaactttgagaagcaacgctgatggggtcctcataacaggacgacccactctccccagtactgacctctgctgtgttctggccttggttctgtcacagccggtagattatttccctttgtgacacacaaaaccagctgggccctgggtctcctcatgctctccagtgctccaggaaggcagaatgatgcccagcaggaaagtgacagaggtggctctgggggctagaaaggggctcactgggtgatggctgggaaggacccacccgctatcttcagtgtcaccagcctggcctctgacccagggacagagacccaggcctggaggtctcgggaggatccccagctcctaggtgtggagggaggtgtcctgtgtgtcctgggaagagaggactttgatggaaggaggtgggaggctctgggttctgctgtccttggtgaaggtttcagggggaccctctccatgtctggggtctgtgcccccagcttaactctcattctctttgcaaatacatatattttgtggatctgcagttgcctgaactgtctcatgtccctaaatctttgtatccctttttacagaaggtcaggaagggtgtgtacatgagtatgaggactatctgatcagggcgagtgtttgtttcccaaagatctctttagatatggtataatacataagataaatgtactgaattagcaattttaagtgtagaattaaatgatactaattctattcacaatgttgtacaaccatcaccataattttttaccagaaaatcttcattataccaaatggaaacttcatacttttaatcaataactccccacttccccctgccccacccactggtagcctctgatactatcaatctctgtgaatttgcctagtttacatgtctcatataataaggaattatatacgtgtattatttttttctggattatttctcttagggtaacacttttaagattcatccacgtcgtagcatatattacagcttctttcctatttatggctgagtaatatcccaatatatgtttatacctcaattttaattcattcatctcttaatggacatgtgggtggtttccacatttttgctattgtgaaaaccgctgcaatgaacttacacttggaagtatctgtttgggtttctgtgttcatttctttgggggtacatataggagtataaatatggggtcatgtggtagttctatgtttaagtttttgagaaacagccaaactgttttccagtttgctgtgctattttatattcccatcagcaatatacgagggttccattttctctacattcttgtaaacacttactatttaatattttttaaaacttatagccattctagtaggtgtgaagtgatagctcattgcagttttgattttcatttccctggtggctgatgaagttgagcattttttcatgtatttactgacaattttaatattttttagagaactatttattcaaatcatttgctgtttaaaaaaaatgggttatctttttattattcagttgtaatagttctttatatattttagatacaagtcccttatggggtacatgatttgcaaaatttttctcatattctgtgtcttctcactttcttcatggtgttctttgaagcacaaacatttttaactttgatgaagttcacttatctatttttaattttgttacttatgctcttgatgtcatattgaagaaaccattgcccaatccaagatcattaagttttactcctatatgttcttctaatggtttgataagttttgctattccatttaggtttttgaaacattttgagttaacttttgtatgggctgtgaggtaggggtctaactacactatctcgcatgtggttatccagttgttccagcacaatatgaagaggctaccattctttccccattgaggaatcttggcacccatgtcaaaaaccaatgggctgtaatggtgagggtttatttctggactcttgattctattccattgatctctatgtgcattcttgtgccagaagcacactgttttaatgattgtagtgttttagtaagttttcaaattaggaagtgagtcctccaatttttttttccagattgttttggccattctggggtgacttttaaaaaagatgtagttcaatggttctcaaagcaggagtggttcagctctccttttttggcagtctggagacctttttaggaccttaatctaagtagataaattattcccactttcttttctgagttgctatgttacagtgtatattgacacccatgaaataattgagagaccctggaagtgcttgcctacatagtgagggacaattagttccatgatcatgggcacagaagattttgttttgggaaacaattttgttggtggagttatattcatgcttactcttttatttgtcttcatagcctgcatctccttcagacttcatatctgtttattttcttgtttgtcctctggggtttgggtgttgggtgaccagtcagctggagctggaggaggtgcttagcaaggcagtgaccctggttgggaggagcagggctcagcagggtgaaagtagctgggccttgagtcaggagtggcatctggaaggcctgactgtaagggtcagaagggccagcaggtgggtgtcctaggcacaaacggtggctgctgctgtggactggaggaaggtaagaggccccgagtattccatgttcttactggctccccaactgaggattcctctcctgggctggtgctgtcctgcagcagggaggggttagacagggacggctgcacatcaggccggagtccatgtcatcctcttaggcactgtcactacagattgaggattctgttcataagccaagcctttgcacaaggaagggacccgggctctcaaggaagagcagctcctggtcagacctccatctccttctctctcattgcctgaggcctcaagcttggtctacctggcacaggggtctggatcctcctcccagggttggggtcttactgagctgggcacctgcaggtgggagaagatctggaggggccccatctgccttcaccagattgatgttgagggtccctgagtcctgcaccactatcaggtgctgagcaacttccagtgtcagtgacaaccaccccatggtggaagcagaaccacctcgtgagaaagcacctccaagcctcagtgcttgccatgtgtgggaatttgctggtttcagttgggggcatgttggtgggtggtcatgaattcagggccggattctatgctcacagtgcacatgctggatgtggtacagaccccaggcagggctcagtggggtggttttgggtgtgcacaggtatcttttctggaggagctggtggtgatttggctcccagaagttcctgagctctgcagactcaccaagcactcaatatttgagtgaacattgggcgagagagcagaaggtaagtgtcagggcatcggggttggtgcctctgggaagaggaggaacattctgggaacaaagctctcccccggcttacagggagcttcccatcgctcctgccttgaggatcagggaaactagggcctctgctcttccaggggctgcttgcaggcagtttgctctgggagggggtgacccaggagttgcctctcattttgcatttgagatttaaaaggagaagggacagtatatcttgccaggtcacaaaaattacaggcatcatattgactgaagggcactcctgtcatcactgcaatataccagaatggtcttttaaaaaaataagtgatttaggtttaccagcaactgtaatgcttgttttattcttctagttcaccgttaatgtcacttttgtagttttagcactggcaatgttgattttatgttgactctgatgattttaagctttcatttgttcacatagagatcatcttctttctgaatattaatgcattttttctctatttctactggttattcctgtacatagagtagagaatcacttttcccaaggaggtggaaagcttctgactaccaaaaaaaaaaaaaagtgtcaaaatgctttaaagtcagtaacttaaagatcaaatccaagagtgggcaacagattctgcccagggtctgaaaggtggagaggtgactggtgaggatgtttaaaagacctctcctctctactccctaaatgggggccatccagtgttcttgaggttcagagaaggcccagggctggggcagcagggcactgtcagctcccagctcccaggggccaggagtaagaccccaacactgtccagacactgattgcattcattttgggggagagtagattcttatttaaagaataatacaaaagtctacaaatatgaacataaacagaaattcctttgctacaattttccccttaataagacattccttcctaatgacatatgtgactgcattcatggctgagatgttttctaggatggtgagagcatcagagtggactatctggtgccttggggtcatgcattttcttcttccaatgtctacaggatcccccatgtcccactttgtagtgtaactcagtgtgtgtcattctggtttttgttgtatagatccttggaaagcccatgtcattcctgctgtgaggtacaggcagccaaatggcatcatctctaaacatgccttctcctggtacatcaaattatggaataaatgaaagccattttgacagatattgaagatataagtttctactcttcccacacatgcttctcccaagtgaaggattttactggtgaattgttattagagattagtgtggatcagtgactctgccaggggaaattttgccctctaggggacatttggcaaagtctggaaacattgttggttgtcagagctgggggagggagtcctgctggcattgagtgggtggatggtgctgaacaccctgcagttcacagagccccaccagtttgaccacccaaatgtcaatgctgaggagtggagagccctgctgtgccctcccgcagcttccctgaagcttcccctcacctgctcctcccatgtctccccaccacttccccacttcacccgcctccttacacctcagtcccctccacctgaactcaccccttagtccaaggccagccctgatctccgctctcctggtctccttgctccttagcaggaggcgcccactagatggcgcccttgcccttactggagctcaccgtctccctttccaccctgagacaaatgtggctgcttttactgccacaaccccagccctccacactctagatttgctcagggagcagctcctggacagacctcagggaccccagggaggagcctcactctggagattttgatggcatggtctttgaacttcactgttacccccagtcaggatccaggatgttgggagtgcatgattctgcccggtcccacttcagcaggaccccactgctgagttgtctgtggggacccgggcctctcatctccttcttgcattgcaggagagggatcttagcactgctttcacataaagtcagataatggaggagtgcaggtgagtttgggaaggtggacatgaagagaggttgtgtccctagaggtggcagcagtgagaggatgggcaggtgggaggaacacagcccatccagggttgccagccatattaggagcgacagcctttcctctaagcctccagcctttttcctgaaacattccagaactttccacttcagcacttcccactgaggctcctcaggtctgtccctgagctcccagctgagcctacctacccatctgaaatcctgagtcctgtgtcaccctcgttccccattattctgtgcagttctgtgggacgcccagctctcctgacacccccagtcttcagaatggccatcagcgctgtcgctgtggcaccagggtgactgccgcctggaggctgagtcctggcttcctgacagctgtggggcccgctctaggctcccttgtcctgatcattcatcacctccaggatgcacagcagctgggccagggggaggagcagggacaggtgtcagccaccctgtgtgtctgcaagtcaggctgggggtgtgggaggacgccaggaatgactgaactttctgatttagagggtgagagcttgcactgatggaatttgggatttaataggaaaagcatagcgttttcctattttgtaggcagggtggctggagtttggaatcatagattcccctgggatgtcactgtggacctcagtcccacccgttaggggcacagatttcagaatccacaccctggggcaaagcaggcatgggaggctccatcagcctggccagggctctctatttgtgcagctgctgcaaggagatgtgcactctgatgggaacagtgctccctcctccttggggggcagtatctagctccctgcagcccctctccctgcaggccctgccctctctgaacctcaccttccccaacccgccccccgcaatcccatctcagctgtaatcccaacactttctcatccattatgggtggactgcttgagcccaggggttcaagactatgctggctggacaatatagcgagttgttgtctctacaaaaagacaaaaattagctgtgcatggtggcatacacctgtagtcccagtcactcaggaggctgaggtgggaggattgcttgagctggggaggctgagttggcagtgagttgagattgtgccactgtatacttcagtgtaggtaacagagcgagaccctgtctcaaaaaataaaagtaaaaaaaaaaaaagaaatatggaatacattattgttaactctaatcaaccatgctatgcaatagtccaccagtaataccagtaatagccaataatgaattatctgaaaaagaatacaatttattcttagctatctactgctaaaatttttaagctatcttttatgatagctgaaacaaaagaagtaaatttaaccaaggaagtaaaagacctttataatgaaaactgtaaaacattgatgaaataaattgaaaaagacacacgcacaaatagaagatattccatgttcatgaattggaagaactgatattgctaaaatgtccttaccacccaaagtggtctacagattcaatgcaatttctgtcaaaacaccaatgatattcttcgaagaagtagaagatcctaaaattagaaaccacaaaaattcctaaaacctgcacaaaacaccctgagttgccaaagcaatcttaaacaaatagaacaaagctagtggcattacacttcctgacaatcaaagcatactgcaaagctatagtaaccaaatcagcatggtcctggcataaaaacaagcacatagatcaatgaaacagaataaaaatcccagaaataaacccatgcatctctagctaactgattttcagccaaggagccacatgcacacaatggggaaaggacagcctcttcaataagtggtgctggggaattggatattcatatgcagaagaatgaacctagaccctatccctcaccatgcacaaaaaattaactcaaaatgtattaaataaagacttaaatgtaagaactgaaactatgaaactactagaagaaaatatagggggaaaatccatgacattggtctaggcaaagagtttttggataaaatctcaacagcataagcaacaaaaccaaatataaacaaacgggatttcatcaaactaaaaagcttttatacagcaaagaaaaaaaaggccagcagagcaaagagacaacctacaaatgggaggagaatatatttgtaaatatatacatatatatttgtaaatatatacatctgataagaagataatatccaaaatatataagaaaattatgtttctgtatagttttatctgactgggatacagaggccacatccacagtcccatcctcaaaggccacttgttcccaaaatgtcaagcacatccctcaatgatccatcatcaacacctatgtctgtaggatgaagggtgaatcatgaagcactaaaaaggaagaaggaagccaatcccaaaacaaaatgatgcagggtctggaaagtccaaagcattttttttttttttttactgcatcttcctcctttcttctccacattcccaatcctcactattgattaacaaaacaaaaaaaactgggacccaccatcttccctactgtcaggagatctagcgagattgtttgagtcttagaccaaactttgccataagccaaatttctggctgactttacaatgatatgagctagcacagtctctttttctgccagtcaacttgtgctcggttttatttgcaaccaaatagaggtggtaaccaaatataggtgaccctaaaattagtcatcaggatgaaatcctaaaatgtgcaacaaactgggttgaattcaggattagtagcaacatctctgttgtgggcttgaaaagggggcacccttttatgcagtagcaaaattgctaaattgttgtttgctgagtctttggactctcatcccggattttctatgaccattcaaacagggctgcaatgaacatctatggttgtttagcttggcacacttctacatttctatatagtaatatctagaagtgcatttgctcaatcacaagatatgcacattttataattgactgctatcgaactaccttaaatagccttaatttgttctcaacattgtttaacagggtctgtttaatgtcctacgtccagcaaggacagtatcacttttcttaatatttttcaaattattggaccttaacaaatacttaatgtgcaattaattgattcctttgtattcccatgccttcttttatatgtttccttatagtacacaaaaccacattattgtttctttacttgtgtcattccaccctggaccattcctatctaaactataacattatgagagagagagagagagaaaacaatatgaaaatataaattgattaatcaaaaaaatttaaataggacaaatcaggaagacacaagagagattttaaaattattcagagaataccacaatagctgtaccaatatattttaaaacttagatgaaacggacaactatctcgataaatgtaaattaccaaaactgactcatgaaaaaatggatattatgaatagagcaataatcagtaaagcaattaaaaagacagttgataatttttatttactgacaacaataacaaaatttcaggtcctgatatttttatggtgaattttaacaaattttcaagctcctcctcaaccaattctcagaaggtttaaaactttaacaagaaaacactttctaacacattttcagaagctgttatagcatgataccaaaaccacacaagaaaattatagaccaatctcacttacaaatatacatgcaaaatcaaacaaaatcttagtgaaccaaattcagaattaataatagcaaacaagcaaaatatgttatcatacgtatggcttatatcaggaatgcaagtatgtttcaacatcagaaaatacttctccacattaacagactaaaggagaaaaacgcttgtttaattatctcaataggtttttagagaattttgaaaattttataaagttatgcgtattctgtaaaattgatgaaatccaaccttgatttatttttaaaaattgcctttcctatagaattataggtaaaggaaacacatgcatcctcacagagctacttcaaggctaagttacttcccataagtaacgtatcctgtaatgtgtgcttggcacatattcaatactaaacaaatatttgcaaatcctcaaaccacttctcgctcaaataacccacctttgtcttttgcctttatgttagggttgattttctcaattgtatcttggagatcctttggtgggtctttcagcaattaccctgaatttgcttttctgtttacaattttaattcctgggaactctttcttgttctctgactgcacccttttcatgagagttcagccatcaatcctccagaaccccaccccccccgcccccccaaaaagcaataaagatgtctaaaagcttccttctgggctttcgaatgatgtttaccccaggcatttgttctattcgttcatcacccattttccctacaacttgcctacacttgatatcagatttttatttattagtcacctatcttcttcattggcccattttcctattttgccactggttgttctcaaatgtgttatgattcctggttgtacagtcaagtggttgataatcttggatatacgataaagatttgctctgtagctgtgtgtaagcctatataaaagcttttgtatttttcttcttaaaaaagacaaaagatggttgggaagatccctccagttcaccagttcgaggctgcagtgagctatgatagcgccgctgctctagcctgtctgtctgtgaaaaacaaggggggcggggggcgggggggaagactggagatgtaaatctcccgcagggccctacccgtatccgcaacaggtctctaacaggaacagcctcaggcctgtgttggaacaaggtaggttacagaaatctggaagccagatctgtaacttcagggtaaggactggctctcagggctgatcccccgggctgggtgtcccagaggcacccgcccccgccccttccccaaggcaggccaggacaccttcactcctctccttaggctccccacccccttctcctccccactgtgcctcctggagtagcggtggcggtgccacaggggagcggggcggggcgggctctgagggcaagggggatgggccccgccggggtcactggcggccaccctggaaactcgacgcaggccggcccttctagtgaatcgtcccagccacagctggcctcccagccgcgcttggggcgcctcggggcgcgaatggtgcaggttggggagactcaccacgcaccgtcgggggtcggtccggttattcctcaccgctcggctccagtgggcgcgcgggcctctcctcctcagttcctgcgctgcagtccctccctcacccttcgcagcttgggaatccaactgtgtcattccgacggagcgccgtgaggacctccgagggtgttagcgccaagtgatctctgtccagcgctctgaatatccaagtaaaggagttcaatgaagggcgggtcaacggaggagaaaccgtgactctctcaagggagcccaaggcctccttgtctaattagtgacgcgccaatggatggaggctcttcccaccatctcttcccagcatccagtgacaccaccgccaagggacgggctcggcggaacctgcaggaaagaagcatcggctgagcctgactgcagcgctgtgaagagacaggggaggggatcagtagttggtcccgcgcccaccccctgtttccgcgaggggcggagttgactggccatgcaggcagagggcgaaatgtgaaattccactactcctaccgtttttccctgacccgatggggcggagtgtcgtcaggctaagttccctggcggtaaggtggggagattgaggcgcacacctgccgaacggtaacgcaggattagctaaggcgagctcaggacagaagcctcccgaggagcaggagggcaaaataataaataaataaataaataataaataactcactccttggtctttatttgcggcaggaattcagaaggtgaaagcggggccttaggatctttctgaccttttgggttttaagcaggaggtgtcagaaatgttaccacagggctagctggcttgtggccagcaagcgttcacaatgccctcgatttttcatccctctctgtgggttctttttttcattgtaaggcagaatttctacgattgctcacccactcagagaacctgagctggtttagaccaggtgagacaggctaggtttaccctggtgatgatgtgttgttgccatggcgatcctgcccagtaccagaggccctgcagattcagatgcttggtgcctgtgcttggctgaggggccaatgggtgaagctgccatctgcgggatgatgactgaagcctctaagtcagaatccgcccaggctgagccttagggcagctccatggagcctcggctggcctgggatagagagtccaccactgtgccagcccccagccactgcctaggtcctgtgctgagagccccttgtccagggaaatggcgtccagtggaaaagggaccacccccttgcccttcactcaaggcaggttggtgacaaccctgaagctaatccgttcctagaggagctgcttctgggtccgagttttctctgcagcagagcagctccctggatgggatctgttcaaagtccgcctttcacgcggaattttccgtccttgcaattttccacctccaccactaggggatcctctctgaccgcctcatgccggctctggcctctgagcaggggtttctcttctgcatgtgcgaccttgcgcatgcctagtggccttttgggacctagagctgctccacaccccgatggggttacagagtgcctcgcctccactccaccccaccagggttccttccctggctgggatgggatttcagaagcgccgaggaacagcccagacaggtgtgggagagtagccaaggcccctgtcccggggtggccaggacagcggtggcctcgcataggacctggctgggctgctgcaatcagtgtcctgccccttggagagcaacagtgaaaacaacaagactatcttcacccaccttaagaaagaacagaaccagtatccccaactctgctgtgtatcccaacccaattccattccccaccccactctcagtagccaatatgcaaaatattagaatactcttactgttattattttcaaccacactctgcatcctgaaaaaccatatatttcgttatgtgcttttaaacttcttgaaaatgaaatactgaggctgggcgcagtggctgacacctgtaatcccagcacttcgggaggcggaggcaggcggatcacgaggtcaggagatcgagaccatcctggctaacacagtgaaaccccatctctactaaaaatacaaaaaattagccgggcgtggtggcgggcgcctgtagtcccagctacttgggaggctgaggcaggagaacggcgtgaacccgggaggtggagcttgcactgagccgagatcgcgccactgcactccagcctgggcgacagcgccagactctgtctccaaaaaaaaaaagaaaaaagaaatactgaattttcaaatacttgctttttttttcggtcaaaattatgttctcaaatttcactcctgtagatgtgcgtggctggctgtagtttttgcatttttattattaggtattctcctgttgcattaatatgccacattttatttctctcatgtttttggtgaccacttggggtgttttttggttttgtatttttgctgtatacatgctgccatggtggacatacctctttatacatatttcctgttgtatgcagacacaattttaggatgtgacatcttcagcttttctattgtgtcgtgtgtcttttccttcgtgctttgtgttatttacatattctggacacagattctttgtcaactgtatgtgctgcacatctctttcccagtttgtgtcttcttcttcttttttttttcttaaaaaaaactttctttatagtgttttttttttctttctttctttgttttgttttgtttttttgagatggagtcttgctctgtcacctaggctgaagtgcactggccgatctcggctcactgcaacctccgtctcctgggttcaagtgattctcctgcctcagcttcccaagtagctgggattacaggtgcctgtcaccacacccagctaatttttgtatttttagtacagatggggtttcaccatgtttgtcaggctggtctcgaactcctgacctcaggtgatccaccctctttggcctcccaaagtgttgggattacaggcgtgagccacagcacctggcctgtgttctttcttaagtagatgttacttttaatataatagaatgtatcatattttgcttttatattagtactttttctatctaattcaaacacatccccaagggtctttgtgtgtagactgaccaatttctcaagaatcatgaatgaatactgcttctctttccccaatttatctgtaatgctacctttattataaagtttctatgcatgtgtagaaatagttcctgatttttcactctgtgccaccagcataccaatagcacgctgtcttaaatattaaatagcagagctttatgagacaacttgatgtgcagtaggcaattgcccccttgttactcttcttcagggttctttgttgtaccacatgaattttagaattggcttgtccagctaaaagacaactgcaaggattttatttggaagttcataattctatacataatttggggaaagtattttcataataccaagtcttcctattaatgaacacagactctctctctctctcccccacccccacctgtttagttatttatatctttatggtctgttagttattgtttattgtctttcaaccaggtttcatgtttttctacatagaggccttgcatgtgaaagtctttcttcctagcttgctattacaaattttttttaattgcactttttgggtacagtggcttgtactgtaatccccgatacctgggaggctgaggcagatggattgcttgagtccagaagttcaagaccagcctgggcaacataatgaggtccctgtctcaaaaagtttgttttaaaaattgcatttgctgttattcaacaaatgtcattgtgtctcatatatggatttttatatctgataaccttgttcaacaatcttttgattctaacaatatatcagattcttttgagttttccatatagacaataatgtcatctgtaaattataattgtttcttctttgttatttcttggaccttttattttatatttttgtcttgctgcaaggcaatatccctctatatattgtggggtcttttttctcataaagtggggatggtgaacacccttgtcttgctctctgattgtataaagcatgctttctgtagcattttgtagacgctcttttttagattgaggtaattcacttttatttctggtttactgagtttttagcataaattcaggctgaatttgagctaaagctttttctggagacatcatttgaaaaattcatatgatttactttctttaagtcaccaaagttatgatttacattgaactgagtttctactgtttaactgtattcttgggagaaaacccacttgtcactgaacaatatctgttttatttactgctgtcttgtgtctaaattttcttttaggattttttgtatatgctcagattagcctgttattctcctttctgtatttttttctggtttgggggtcaaagttataatagcctcacaataagagctaagaaaccagccctaatggaggccggggcaggaggtttggagttcaagaccagtctgggcaaaatagtgagacccccatctctatgaaaaatagaaattagccaggcatggcagtgagtacctgtagtcctaggtacttgggagggtgaggcaggaggattgcttgagcctaggaatttgaggctgcagcgaactatgattgtgccactgtactccagcctggatgacagagcgagaccctgtctcaaaagaaaaaaaaagaagaaataaaaaggaaaagataaaagagctaagcatctgtttccttttttccattttctgggagagtatgtgtaagactgtaattaactgtttcttgaataatgggagaactctgtaaaataatctggctttggtgttacctgtattggaaggatgaaaaataccaattcagtttcattattggttgatagggctactcatgctttttgttttgttttgttttgttttgtttttgagaggaagtctctctgtattgccctgttgtccaggctgagatgcaacgttgttcacaggcctgatcctggctcactacagcttctaacttccgatctcaatagatcctcccgcctcagccttcccagtagctaggactacaagcatgcagcatcacatccagcctcttttcctgcctgacccagttctggtttcctttagttttctaggtgttcatccattttatctaatgtttaatgcatttggcataagggtgctcagtgtcctttcattgtctgttgtctgtaactgttgccattttcattcctatttatgagtactggcgtcttctctcactttttcttaataatcctgctggaactttgctttttaaagaacatcttttgacttgttgattcttttttcatacatattaactattttcttattttttgcctttatatttatttcttttcctgtttgaaacattgctcttttcttactataaaaatgggtaagtagctcatgaattaccacctcttttaaaaatcttttctactgtaagcattttagcagtttacatttgcccacaagtaccacttcagctacaccctatgtgcttttacataaagtcttcatttttggtaagacatattctcaaattttaattatcacttgtttttaaatccatgatgttttatttgaaatgttgtttctaaagatacattttctggttatacttttattcttctaatttagcacagtggccacaaaacatggtctgtgcagtgcatacaatcgatgagtaatttctgagctgtagtatttggcataatatatggcaaaatttcctaagttttccatgtgtgctttaaaaaacttccagtaaaatacataaatctgttagatcaagcttctcacattgttcaaatagtctatatgtttactgattcatttgactgcttgatttatcaattacaggtaggaatgtattcaaatctcctattaaagtgtgacactcaagtggctttttaaagacagagatgccaaaccaatgaatacatgattttccccaaagcctgcacaaattctctaatgaaattttaccatgaaagtttgtttaattaaggcttactaaagcagtatgttgtcttttactttttaaacagagaatatatattttaatacatcgtttaagtttatgattaattatctattactgaggataagaatctttgcctgtgctcattcagcatttgcacttcatttatgatctgccttctcatagcttctgttaatttttatactagagacatttatttgtttgtataaatgttgaaggtttttttttgttgttgttgtttttgagtcagagcctcgctctgtcacccaggctggagtgcagtggcatgatctcggctcactgcagcctccatctcctgggttaaagtgattctcctgcctcagcctccagagtagctgggactacaggcatgtgccaccaagcaaggctaatattttgtatttttagtagagatggggtttcgtcctgttagccagggtggtctcgatctcctgacctcatgatctacctgcctcggcctcccaaagtgctaggattacaggtgtgagccaccgtgcccagctgggttttttatattataaggagatgtaatagatagatagatgtttcaaagatagtcaaatgtttttaaaatttaaaacacttttttacaggttgactttcaccatttaatttcatctatgtgttttgccttagagaaattttaaatgctatgtagatctcatgacttataattatgaagcattttgttttctgttttccacgaaacttagcttaactttgagcatataatagttgtaaaggtaggagagtaacactgaaaaaaggaattgcataaaaatggcacattttctgtagagttgtttatcgcctgaaaataggccccatttcatggaagtaagatgatcaggctcaggtccccagacgaaactcttggcatggtttttggagatagtccagggctcagtactggctctatcatttgctacttctcccaaagtaaccaatatctcatccaccctgagcccatttccatatctctaacatgaggataatagcatctaccttacacaccaagtagagggatcaaatgtaggaactaaatcaaagtaccagcactgaataacctacatcctcccacttcccaaaaggaagagagatgtatcccctgttgacaaacgagaccattttgcaggagagaaaggaaatgccagttcacttgcaatgtaaacatgctctctctttttagggatgtccagggacctgagagagaacccatgcttaccaaagagtttctagttccagacacacaggactcgaagggtgacaagtatggttttcagggtccctgaatccacccagtcctcacagaaactcctaaaagctgtcgattgacagcgttgagttcacagctctggtcctcacatgctgatactgcttgtgatatcgaacccgacaggaccccacatcacaattgatttaccaactacaatataatacctcctgaatctccaaattggctcacccaggaacaaaggcttggggtaaaactggattaggagatataagctctgaattttctgagggtgagacacacaaggattctaagtgacacgccacagagtaacgggtctgtgactggaggacccacagatttgtcttactggagacaccacatgcacacaaactccatccttagctgtggaaacaagggtcttttgctatcttagccgaattctgggagtaatttttggaggggaggagatctttgggattgcctctttcaggccctttacaaaaatacctacttcttaaatggtaaagcttacactaaactgaaaaaattacatccttggctttttatgaagtaggtgttggattgaatcactactggaagaagtatggcatcgcaaattctaagcagtggtcaaaggatggatctgttaaattagaaaaatctctaaatttataaaaagattttagattcctttattctaaacaattgacctatttgtactcatgggacaatcaaatttcaaaggagatatgtaacgatttcatggcttgcattaaaaatccttctgataaaattaaagataaaaaatctgaccccctgccaaaaaaatcttttgaagttcatactgcctgctttcaatattctgtgggattcacaatgaaaggtgccttatattgtggcctagcttcaagtttatgccttcgccaccatggcctgggttcaattcccagtcagggccccagcgcctttggtttaatgtttgcgtggcatttgacttttttacctatttagtattggtgagattacctttggtaaaaaaaagtttaaagagtggaaatcgcaattctttgtgttggctaaaatctgattataagagatctggaaggttttatttttctttttcaaagagctctatggtcagaagtcggcttcatgaaaagctaatatttaattatatgtacatacagtctttctggattttctcttttgcctcctgttttgaaaaatatttggatttgagtgaaactccgttttagaaattaattgcttggtacaatatacccatgtaactaccctgcacatgtaccccctgaatctataataagagttgaaattttgacaaaataaaattagattttgaattaaaacaaataggtgcttggttcctctgctcacttctttttaaaaggaattcctctcccatgtacttcttcttttcccttctttaccttccttttggcatctttggtatcacatgaagggatctagagggaattttaagtgactctgaaattccttgagaaatacacaaaaagatcccactcaccccttttgggggtctcctgttctccttgtggagtccagagtcagggacaggctcctccaggtctgcagctctgctctcttttatttcatcttggctgattgctttggttttgtgagtaccaggcattactttgtactgtgagagacacgtcctttgtgagtgcaacggctgctgggtcactggtgagggctgcagtttggagatggctgagagccgttgcaataaatggttgtgattgcagggggctccttgtttctttgcaagtttagatgagaaaggtgcagtttggacacagtttaaaggctgtgaaaacaccaccaatgaatatgatttcctttggggatggtctgattaaaagtgggctgattgttgctgtgctactagccttgaagacatgtttctacagcattgtgcagtgtggaaaaattgtgtggcttggtcttgtggcatgtcccttcttttagagacctcagattcaatgtgaaattcgggatttttgattttcaaagatctagatgccctgccttccagatgtgcctactcttcacatattttaaaattagatcctataaactgcaaatactttgttggcttctgtgagatcagaggtccagttagaaaaggaagacagtttgttaaaattaaaaactatttatctaatctaactagattggcctccaaatatgactttctgacattcagctggttactctgaaaagatttctaaatctcttgaggctcatctatatgtttccttgcaaagaaaaaaaaaaaaaaaaaaaagcaagcccaagcactagtaagaaaaagatttgcaatgtttcatgaaaggagtagatgagtgaagcatttatttgtagatactgggttggatacctgtgcaaagaagaagaggtcaataataaaaattgccaggggatttcttggaacttaacaagctgaattaaatatagaaatgtcaggaaatcaaggcaggaaatactcacttgtggttaggcagacagggcagggttctgagcttgagatggagcaaacagttgtggtgggtgaagttcacatgctttagagctcagctgtcctagtaaagaagcctaagagtctctaaagctcttatgagaagatggattttttttgcctagattaaaaggttaaagaattgctttaagttggataaaataaagctaaatgtttaagcaagttgtgaaaggtttatgaaaaaattaattaaaatatttttgtgtgtaaacatattgactaaagttgaaggggtataattcagcatttctgtaaattgagcattgaaataaaaacacaatgggtttctcttagagcactaacctgctctttaacaaaaattgtaaagggttatagaaagtctataaaaatgttaccttatggtcaaacattaaaattgggtaaatatgtctatcaggttttattaagaattaggtttaacattaatagtacactaatgtaaaggtgaaatttggcttatttggtacaaaaatcatacaggaagcattgtgaaatataaaatgatttttagctttctttgggctatatttctataaatatgttattgatgagggttccaaagttatgggagactcctataattctgctatatctcagtgtacattatcagtcataattataattgtcatgttaaattattgtgggccacagaggtaacagatttccttgtcaattgtgtctttgactatgactaccctaaaacgttcagtcacccatatacacatgttaccttgttttggccctctttagaaggtaattttataatcagctataaagccctaacaggtgctcttaaatgcaaattttgataactttggagattgtgacatcagaagagaggaaaaatgttcgggacacttggagagctaaaatgttcattgatatcaagcaggacaggaattaactgcatgaagtgaactaataggaggctgaagtgatctttttgactttttgcttaaaacgttgctgatcctttgttttgcttttcagagtcaaggcaaattttcttttgagctattgacagcttttaacgattaatcaaaatatactcctatgaacaccatttggagcattatttgtttctctctacccgatttccccagaatttggaaactatttgtgggtattcttaatttatggcaatatagttatttgcataagtgcaataagaatgtgttttctttggtaacaggacacaatttgaaaaactggttattttaccaaggttttgaccagaatgctgtgctttcctttaaggaatcaaacttgacttgtggagctaataaagcctttggaaaactgaccttatatcctgtgaacacagtccctgtacagggttactgatctgtgggaagaaaagaatgtcacattctgacaggtcaggaatcccaagttatcttgaaacttcaagaggacaggaattcacccaaccatatgtatttgatggtagaaatccatggcaggggctcagctttaaaaagtcttatctcagattccttctataaaacaaagtcccattaaaaccaattttaaaagcctatgtgaaaaataattattcttgctgcacctcgtacaaataaagtggcaaagcataataaagcaaattggtcctgtcgtaatttgtctttagtaaaaacgggaaactggggtcgggtgcagtggctcactcctgtaatcccagcactttgggaggctgaggtgggcagatcatctgaggtcaggagttcaagaccagcctggccaacatggtgaaaccccatctctacaaaaatacaaaaatgagccgggcatgatggcgggtgcctgtaatcccagctactcaaggggctgaggcagggaagcggaggttacagtgagtcaagatcgtgccacttcacgacagcctgggtgacagagcaagactccatctcaacaacaacaacaaaaaagggtaactggagagagggaagttatgtttcaaaaacttttggaaactatagtacacctgtttttaaattctagtctggcattcagtttttattattttctacagtttgggttaaattcgtatttctctggctacaagtctcctaaataatcttttcatttgtttcctttttctttccctttttccccatttttcttaattggaaatcactgaaacctaagctgtgctttcttaaagccctgtgaactgaagactagacaaccgaaacttctgaaggaagtagcagcaacctatttatatgtgttgctgttgcctactattatgttttagcaggtgctgcctctacacccccgaaacagagagtgctactgggaacaaatcgactttttccactccagtgctgcattcggtgccccataacgatgaccccctctcagcaggaagtagccagaaagattacaatgctccatctccctatgattcttgtgataaataaatatacaagcatgatagaaatcatgcgcaaattgacagtggggattgtggcaggccagatttcactaatggaggtccccatcacaactacttcagtactgactgagtggttaagttcagtatcaaaagctgaaagtgccagcgcctttctacaaaggctagaatgtaacaaaagcccaccaagggttttacctaggcctttcctgggccttacagcatgacaaaacaaagaaggaattcttaaccagacctgtttaggattaaacaaatttaattgggggtctgaagaaactcgccaggcctccacaaacaagttcattgggggtctaaaggaaccccccccaaacctctgtgattgagcaggagacaaggtcagggtaattgccccagcacctggactcatttagatttaagtaaatgtactgaggctccagagaaaggtctccaagacttagactagagttacagattaaaagaagttaatcacttatatctttagataaatgcacactgacacgtagacatacatcttagaaaatatataagctctggaaaaccttgtaatttacagttggtctggagatattttctgggccttctctctgtaaccggttccagaaataaaaaactctcttcctccccagtttatctgcatctcgttattgggccgtgagaaatagcagccagaccctgagtttggtctgggaacacactggctgggcttcctgcctggcggtagagcttcactgtcctccttcccagccaaaatgtggcccttgaaggcttcctccccaactgaccggttttgggttctaggtactcagggaacaccgtcttcaaggaggccattttcatactgttcctggtttgatttttctgaaattaggaaatgccccttgaggcatccaggattgtctttatttcccctgaagcttcccctcctgaagaaaaaagttctcaaacaccctcaggactcaaaccccaagttcaccctgtgaaacattcccatttcctaaacccaggcaggctcatggccctcagcctctcagaccccatggaaacctcctcccccacttcacgggttctctccatattgagagcctcccctcctcggcacacaacccagagactcaccccaacatgtgtagcaaatcaccctggaaacaatcatggctgaacgtggtagcccatgcctgtaatcccagcactttgggaggcccaggaggtggatcacctgaggtcgggagttcgagaccagcgaggccaacatggtgaaacctcgactctactaaaaatacaaagttcactgggcattgtggtgtgtacctgtaatctcaactactcaggaggctgaggcaggagaatcacttaaacctgggagacagagattgcagagagccaagatcgcaccattacactccagcctgggcaagaagagtgaaactacatctaaaaaaaaaaaaaaaaaaaggaaaaggaaaagaaaaaaaaaatcatgaggcaacattgcatttaacaatattttatttatcaaaagacacttgtctttctcaggtaagtgaaggtctagagatgaaacgagtcccgatgtaaattgccccatgggcattgctgagatcacaagatcatcactgcagcatgcagcacaatagtaaatttctcaggatggaagttcaacaatccaaaaggtagtattttttttcatgatgctcagtccatcatacgaaataaaaataaattccttttcatgatcatccattcagtagaaaaaatgatagtaaatttgttctcatgaagatttttaccgtaacatataggatttatcgttattattattattctttgttttttgtttttttgaagcggagtctcactctgttacccagtctggagtgcagtcgtgcgatctgggcacactattaacctccacctccagggttcaagcatttctcctgcctcagcttcccgagtagctgggattacaggcatgcgccaccacacccggctaattttcgtatttttactagagatggggtttcaccgcattggtcgagctggatttgagctccggacctcgggtcatccgcccatctcagcctcccaaagtgctgggattacaggcgtgagccaccgcgcccggcctcaatttatcattattcacgcatccacaaactgggttcttatattttgtacgtgattttttccattgaggagagatatctgtgcatattcatgctgctcatatttcatccacaaactcggttcatatttcatccacaaacataattttttccgttgagaagagatacttgtacatatttatgctgttcaaattcacatttcatcattcttttacaagaaatagataatgtattttaaggttttccagtggtattacagatattttactgggtgtatagatagaaattaaaccaaacttctttgttctggccgccagtcatgcatcctgttttcaacatagttcacatacaactggttgtgtaaaaatgaaattattttgtttagtacaatcatcaacagttggttgattagatttttaattatcaagttaatcattgtcattatgcttctcatcgcactcgtcattaattgctgtgggaggaaatttgttatgttccctatgagagggtgtatcacaaattcaaataagaattcaacgacaatggactgtataaaggaaataagcaagtccatggaaaacatatttttttccggaaaggattaaaatatttttaaaaaggaattaaaaaaaaattgggcacggtggcaaatgcctagagtcccagctgctcaggagatggagacagaaggattgcttgagcccaggaataagttggaggctgtagtgaacagtgattccaccactgtactccagccagggcaatagagggaaaccctctttctaaaaagacaaaaagaaacaaaacaaaacaaaaaaacaccacatcaaaaaacccaacaacaaaatgaaaaaccaaataacagcaatacaattggagctattcgatccaaagaagtaaatgaaacataaagcaaataaaagagaaaagctaatacctgtgtcctgcaggactcagtccaagttctgctctgactccctcctggtgagccaccccttaaaaagtcacttggggcggggttactttgacagacagtcttctgtcaaagagggaggcggtaaatagcacttttttttttttaatttaacgcctttccaacaaattagcggctatgttgtctaagagtgcaaatgtcagaggtgggtacaggcagcaagaccctccccacaggggcagcagaaggaggaatgactaagggaacaagactttagtgtgctcaactacacaggacaggaaacagatgctttttacaaaagctggtggacttgaaggcagaatattttcaagttcctgtaactgcgaactatgacctgtagcctgtgagagtgactttctgtggcaaaggagcttttgtgaatgtgaggaagttaattatcttaacagtgggaggttctcccggcttatctagctagaccctcgtgaaatcccaagtgtccttaggaaggggaagcagagagagatttgagtccagaagaggaagaaggtgatgtgaggcccagtaggggaacaaagggcgatggcatgtaaacacttagcccccagaagtgggagagggctggggttcatcacaccagaatccctaacaatcagccttattttaattacccttgaaatggaaggaggccttagagagccagaggcttggaggggcaccctctgctgcatacacagatcccaactgctgtgggctccaaataattgcaccagggaaatcacaaattatcaaaaataaaggatgtaaagcttttaaaaaatattaaaagcccaacaaataaaaaaagttctaaatctataaaattgacctcagtctgtatatttagatgagtcatgtgtatatagcgtttcacttcaaaatatatgataaatctctcattcattggcttaaaaataaacacttcaatcaagtctttatcagaaaaattgaaacgttaactcaattgccttttagttcatgtgactttacaaaacttaaaacaataaagtcagttttaaaaattattagtaaagtaaaagaaaaatatcttcacaatgtagacattttgtccacatgagacatgtgaaatattgccattactaaatatttgcaggtcaaaaactgtttccaaaacattttaaataatcatctggcctgtctgttttagagcattcaattctagctgaggtctggggacatgtgaaaggagccacggcccgactccgtgctgggaagagtcagacattttccacagctctgtcctttgctgtgggctctgcaactcctaccaattaaaattgcttacgtttttgttttatttttactaaagaggggttcctaaaagctaacattatactgagtatatgtaactaaaactactaagaaaacaatttcacaattatacaaatgtgccaagtaaatgaaaaaataaactgtattttaataaaggttataaaaagaaaaacatatagtggtgtgaggactgtctcaggtcttcactgagcaagggatcatgacattctatggcggacagctgaccttggctttctgctcctcttgattatgtctactaagtgacatacttactctttttccacctgtcttgcctctaagggtaacaggttttatgagatccctcctagtgctttgcaggtcagcctccctttgctgcattccaattttactgcctataccctccagctggcttttgatgacaaaagtcctggtcccagccattctcagattctgtcatccccgtgggcactatggagctcagcactatgggaggttccccaaaaatctcgttttctatgaggaatggccaccacctgcatctcagtgatgctagtgacccctttcctactcctgtgctcactggtcctcatgaagatcctggttggtctgtagccccctatttttcctattaaagagaaattacagtaagacccatttgtgtgcaaaatcaattttaggcttattacacttggcctgataatttgcataaaatgcagcaagaattcatcggccatataggctacttttgagttaattttcctgggtttttacctaaaaatatactattttggttagagtcttgtgaaaataaccaatgtgttcaattgttttattttaaaaggctcttactgaacactataaatatgtataagttgaatatacaaactatattgtcataaaatcacaacccaaaatgtggagaacgcagagggaaaggtaaatttgctcgcaaaaacatacttcacccaaataactggaaaaaaaaaaagactttcatgacccttctttaaccagagcagcagctttcaaacaaggtgtttgccttggaaatgccattcacaagccaaacggcccttgagagctgtctgtcaggcactgtagaatctagcagctcctcacagagttagaaatagtttcaggaaagagattccctgcttttagtaactgcactttatattcccagatagcgagattgtatgtaaaccatttttatcttattctggaactcttttgggtactttttttttttttttttaaatgatggagtctggctctgttgctcaggctggggtgtagtggtgcgatttcagggtatgagaaaatgcagctggacctggctctttccaggaagaccctcacagccaaggagtccaaagcctggggttttcatctaattccagtgtgactggggtaggagcagctttggtgctgggtgtgtgtgtgtgtgtgtgtgtgtgtgtgtgtgtctatgcctgtgtctgtttagggtgttaggctcgtggttgtctagatacaaatgtcccagggctcaggagccccagggttatgtcaggggcaccagatgaaggtgtcaacagaagttagggcacaagggacaaaggtgagagcaaggttagattcatttaggtgcaagaaatcatagagggaggagggagaggaagccctcctgctaccaccgaggaagaagcgcagcttaaggcagaaagcctgtccggagaggaagtgagtttgagggcagggctctctgggtaaagtacggtctgggacaccagcctgggggaagggtacagaatgcagagtggcctggcgtggggactaagaacagaggagagcagctttcactgggagggtcagtgttttcagtgtccagcactgagcaaggtgagatttgggcagcttgctgtgaaataaggtcaggctctggcattgtccccattgcgtgtgtgtgtgaggggcactttgggagagtgaactctccacctccatcctctcatacgtccttcaaccgagcttgccagttaccctgattccaaggagatctatttattgttgacaatactggatcctagcagaggctgggtaggagcctgggcacaagcaagtggaggagggggcctgggcctgaaagacctgggaggtttgagagaggacacagcccacagaatggagcagatggggtagagtcggcaagcattcagggctcctagtaagttggacaatggagaccctgaaagatccagtaaaacggggagaacaaacaggtccccaactcacatccttgcagtgcctggagcttcagactccagacaggtggggaaggaaaattgagggatgtgaacatgttggagaatgtcgtgccctgaagaatgaagaaaaggggggtgaggaatgagagcaggaacggcttccagtgcctggtgcccaggagaactcagaaaatgggtgtggtggagaggaatcgaggaaccggaagtggtggaagtgtgcagggcccctccgagatcactgtgactgccaggcgtcctccctggctggagagcttcactgtcctccttcccagccaaaatgtgtcccttgaaagcttcctccccaatggactggttctgggtcctatatatttgaaggggtggcctgcctctccacacctgtgggtatttctagttgggtgggaggagagacagagaaaagaaataagacacagagacaaagtataaagaaacaacagtgggtccaggggaccagcactcagcacaccaagggcctgcaccggcaccggcctctgagtttcctcagtttttattgattattattttcattatttcagcaaaaaggaatgtagtaggagagcagggtgataataaggagaaggtcaatgaaaaacatgtgagcaaaagaatctatatcataattaagttcaagggaaagtactatgcctggacgtgcactcaggccagatttatgtttctctccacccaaacatctcagtggagtaaagaataacaaggcagtattactgcaaacatgtctcacctcccgccacagggcagcttttctcctatctcagagttgaacaaatgtacaattgggttttacaccgagacattcagttctgaggggcaagcaggagacagtggccttcctccatctcgactgcaagaggctttcctcttttactaatccacctcagcacagaccctttatgggtgttgggctgggggacagtcaggtccttctcatcccatgaggccatatttcagactatcacatggggagaaaccttggacaataccccgctttcaagggcagaggtccctgcggctttccacagtgtattgtgcccctggtttattgagactagagaatggcaatgacctttaccaagtatactgcttgtaaatattttgttaacaaggcacatcctgcacagccctaggtcccttaaaccttgatttcatacaacacatgtttttgtgagctccaagttgggtcaaagtggctgggtcaaagtggctggggcaaagctacaaattaacaacatctcagcaaagccattgttcaaagtacaggtctttttcaaaatggagtctcttatgtctttcctttctacatggacacagtgacagtctgatctctctttcctttccctacatatattcatggaccacagtcttcaaggagtccatttcctcactgtttttggtttgatttctctgaaattaggaaatgccccattgaggcacccaggattgtctttacttcccccagagcttccactcctgaggcaggagcttctcaaacaccccccaagactcaacacctaatttcaccctctgaaaccttcccatttcttaaatccaggcagggtcatggtccttagcccctcagatgctgtggagaccttctttccctttcatacattctctcaagattaaaagccacccctcctcagcacacaccccagagactcaccccaacatgcattgcaaatcaccctggaaacagtcataagaccacactcatttaataatattttatttatcaaaagacactctttctcaggtaagtgaagttctggagaggaaaagaggagtcctgatgtaaattgccctgcaggccttgctgagatcacaaggagattgttactgcagcttgtagcacaatagtaaatttcttctctggatggaagttcaacaatccagatcgtagtatattccttttcattatgctcagtccagcaaatgtgatgataacaaattccttttcatgatcatccattcagcagagaaaatgtttgtaaatgtgttttcatgaagatgtttaccataacatacaggatttaccattatcaatgcatccacaaactctgctgttgttttttatacataattttttccatcgagaagtgatagttgtacatattcatgctgttcatatttcaaccacaaactctgctggtttttttatacgtaattttttccattgagaagtgatacttgtacatatttgtgctgttcatatttcatgtttcatcatccttttacaataaataggttatattgtattttaagtttttctaactgtagtgcagaaattgtactgggtgtatacatagatatcaaaccaaatttacttgttctggctgataatgcatcatttatttcatagattatgtatttctttgacacatttcacgtacaactaattgcataaaaatgaattttcttttagtatagacatcagcatgtgcttaattcggaatttaattgttgagttaaacatcgtcattgccttttccgttgttattaattgctctggtgggaattttgttatctcatacataagacagtgtgccacaatatctcttaaaatttcaatggcaataaactttatatttaaaaacagggaatctatggaaaacacatttttttctaaaggattaaaatatttttttaaaataattttctaaaaagttaggcacggtagcaaacgtctagagtcccagctactcaggaggctgagacaggaggattgcttaagcctacgagttgggggctgcagtgaactgtgattgcaccactacattccagccagggcaatagaagttaaccctttttctaaaaaaaaaaaaaaaagaaagaaagaaagaaaaaaagcaacaacaccaaaacctcaccaacaaaatggtaaagaaaaaaaaaacagcaatacaatgtaagctatttgatccaaagaagtcaatgaaatttaaaacaaatgaaagggaaaaagtaatacttgagtcctgcaggactcagtccaagttctgctgtgcctccctcacggtgagccacccctttagaagtcacttgggtcataagttaacccgataggaagtgtcctggccaatgaactagggaggtggtaaatggcaccattttaaatttaaattcacggccttttcaacggatcagtagccatgttgggtaagagtgcaaatgtcagaggtgaaaagaggcagcaggaccctcccctagtgcttgggcaacagaaggtggaatcactaaggggacaagactttagcatgctcaagtacacaggacagaaaacatgctttttacaaaagctggtaaatatgaagagggaacattttcaagttcctgtaaccaagaactaccgcctgtaaccggtgaaagtgactttctatggcaaaagcgtttttgaaaaggtgaggaagttaaatatcttaatgttgggaggttcttctggtttatctggctagaccctaatggaatcccaagtgtccttatggagcggggagcagagagagagatttgagtccagacgaggaagaaggtgatgtgagtctgggtgcgggacagggggagaatgatgctatgtggggatctgggctggggaatgacttagctgcatgagcggagtgacttagactcctgaactagaagaaatctagggctcatcacctcagcagccctaaccatcaaccttatttttattacaggtcttccatcgacggactccctaaaaagccagcggcgtggaggggcgccctctattggacaaatagatcttgactactttcggccctcaaatagcctgactaggcaaataacaaataataataatttttttttaaatcatggaaaatattttaaaaaacaattaaaaagttataaatctataaaatctgcttctgtctgtgtgtctgtatatttagatgtctcatgtgtacataatgtttcactaccaaaatatatgatgaaaccctcattaatcggcttagaaaactaaacacctaaatattttctcagaaaatacaaaaactttaactcaaatcccttttaattcacctgactttaaaaatctttaaaaaataaagcatgctttaaaattattagtaaagtaaaattagaacatcttcagaatttagacatttggtttaaattatacaggtcaaatactgcccttagtaaatattttcaggtcataaacaactcctgtaatcttttaaataattgaattacatgtctgttttagagctttaagttctagctaaagcctggggacaaatgaagggcaccatgccccctctctgtgctggaaagagacattttctacagctctgacccttgcagtaggctttgcaactgctacctatcaaaattgcctacatcctaagtttattattaaaaggagttgcttggagttaacattataatgaatatatgtaactaaaactatttctcatacaaagtatatgaaaaagtagaatgtatttttaataaaaagttataaaaagacatgaacatgtagtttttataaaaaacagtaattttgtctagttttgcagttctaaaaagttatgttaaattcaaaaataaaaaataacaagacaagactcaaggtttaaataagttgtaaaagatttgtaaaaattagttctataaaaattttacaaaaaaaagcattggttaaaatttaaggaattattttgtttttacagaaattaaacattcattaaaaacactctgatacaaggccttaatttgggttcatgtatcagaatagcagggttttcttagaatattaatctattctttaaaagaactatgaatgttatgcaaactttataaaaatcttaccttagagtcaaactgattaaaattccatagattttacgtaaaattttattaaaaattaacttcaacaaaaataaaatttgattttctcctttaaacaaaagttttgcgtaatattaaataataaagcatttttgtttaccttttaaactataaacacacacacacatacacatacaccaacactaaagtcagctgacctcatactgtctttattggatattcttgtttaaaaaactatcttctttggaaaataaagttttttattttaaaccatattttaaattatcattttgactaaatccataacatacagtgatctgtaataattctattttataatatcaagtgttttgaagaactccaggaacagccatgagagaacactgtggtttagtaacactttatttcctcagtttgaaaatagttgtctttcttggggaggccggtttcagcagatgaaaacaagagtcatgatgaaaattacccagcagtggttagtgtgaccataggaacattgtcatcaggtcagcagaaaacatatcagcaaatttttctcatactggcagtgtgtaggggtggatgtttacagttcctgaagccccagtggtcgtgtggtcttttagttttgccatttataggcaacttgtggtaactagctcaattagacacattccttatcacaaggacagagggctttctgtatcctagggttcttgccttggcattccagaagaatcaggtcacacgtggacgtggagaatgagtgcaaggttttattgagtggaagtagctctcagcagatgggggagccagaaaggagattggtttctccctggattggggccgttcagcagccctggctctcctctgactgccccaggcaaaatccacatcgttctataagtcggtgccctgctggtgtgctggtgcctgttgtcatgttcctcttcatgtccagccgcctgtgtgttcctccgctgatgtgctcctctcgacgtcaagcctcctgtgtgtctgactgctagggtcttggggtttttataagcacaggatgggtcttagcaggccaggatgatcttgggaaagacaacattcggtcaggaaaacaaaaatgcctgttgtcatctaggtccgtggggacaagcccaggtgtggagcttttagccagggaccacagcctcctgtatccaacacttcccttcaccttttctatatcattcaaagggatcatgcccttcccatcccagcacttcactttcatgtcatttgccccctctgaagaggtacatctaactgccattagaatatggatgatgaccagtcttagctgcttcctgctgaaagggggcattgttttgggggaaaacggcagtcagattcctcccaggggtctctataataaaagatcgaggtggctactttcaggaggtcctctaatgtactatctggtcccaagtcccatttctgcaacctcctcctgatgtcaggagctgcctgagtaataattttatcctttaggattatctgtccctcgattgaattaggagatagagaggtgtgatttaccaaggcctctcttagcctctccaggaaggcagtgggattttcatcaaatccctggttaattatggacaacttagtataattgagaggcttggtcttagacctacgtaagccctctattatgcacacctgaaagtgtctcctcttccagtcttccatctcattattgggatcccatttagggtccttcactggtgctacttctcttccagttggataatattcgctcccttccctgatgctataggtgatgcaaagctcatccccaaatctctctgctgctggcagagcagcctgcttctcagtgtctatcaggttctgactcaaaagtaacataacgtctctccaggagagttcaaatgttagggtgaaattctggaaagcttctatatatctatcagggtcatctgaacacttgcccagatctcccttaatttgctttaagtcttgtagggaaaagaggacttggaccttactgggcccaaattcactgggcatctgtaggaggggcaagagtgagactgggcttgtttgggatgaagatttctaggaggggccaggtgagaggctgaagctggatacggaggttggggtggacccagaggagcagggcttgagggagctggcacgtcagctgggggtgcgtctgggactcgtgtctttaattccctgggcttgaccctggcagccttccccgagacagcaaacaggagggctggaacaatcctacatgtcagcaaaggtctggattgctttgcaaggtatagaaagcctgcacatttggggcctcagaccatgtgtcctcacatccagagaaaagttctaattgcaggatggtattgaaatgaatggtcccttcctgaagccaagccagtccttcctgtaaaccataatttggccaaacctatgtgcggagggctatgagatgcttttcctctggattctgagggtcaaaacagtcccaatggttcaggatacactcaaggggagtacaagctgggggtggtgaggagaactggctgcccattctgaaagacagggaatagaggtgttcctcatttcccttccttcttttggcaaaaagctcagggtgtgatggggagggaaagcaagcatcttcacttcactttccacctcttacccctgcgccctggcaaccttggcaggtgccggccacaggtacaaatgcggtatgtacccatgaagcagggagaacctggagattaggaattaactgccctcacctatgtttccttttctccctgctgttgaaaaactttgagttccctgggcctttttatcccatgaggcatggcctccttctgtgggatggggttcagtcagcaggaattggtcctgtccatttacattgtgcctgttgcctggctttgaattcctcagacctgctttctctttctagggcctcagcctgaagcttggaattgagtttgggactgaaaaagcatttcagaggctgtttatatccatttagtgcctcaaataagccctgctgaatttgcaattatcagccagcaggggtcactcctctgttaacttccctattagaaacagagcggtggggattctcacttagaaaagaaaaaaagagaaaaacagttaaagaggcaaaaagtggggaatgctgggggaagaaccccttgcttagtgcaagtgggcccctctaatccttataactttcccatccttcccccagttcagaccaggttgaattccttggccatggaaggaaaggttccattgatgcagtgggtgagaagcactctgtagggtcctggctaccatcggttttctcacacccccctcatcccaggcagtggagggagacacttctgcgacattgctccccctgccccttcatggctattgggtgtggcctttgcctgctgcaggcatgcctaggtgctggagctgggagggaaaagggtaaggagaggtgccctggaagccgctcatgcctggggctgtcaaggtggaggcatacatggcacctctaggaaaaattggtctgatttgcacctttggcggctgagccaaatgctcattttacttagtaacattgcctcagcctgtagcaaaactcttaacattataaaggaagagataagatccatttcaaataatgtgtgagagagaaaagagatgaaaggaaaacagagtcttttacctgcaggaaagggagagaagtggcagagttttggaagaaaggcaggcccaacagtttcccattcactcacactcaccttccgagatcccagacgagccaccagttgaaatgggaaaagtttccttgtccccctcacaggaggtggagtgggggtgtggcttgcttctttagtactccgctgctcaaacctctagggaagcatacagactggcaagttgtggggctacaaccccatggcagcatctaggggtagatgtttacagctgctgaagccccagtggacatgtggtaccatgtgctcttttagttttgccatctataggtggctttgtggtaaccagctcaattagacccattccttaacccaaagacagagggctttctgtatcccgcggttgttacctaggtgtaccagaaaaatcaaatcacacgtggtcttggagaatgagtgcaaggttttattgagtggaagtagctctcagcagatgggggagccaaaagggagaatagttttcccctgaagtcgggttattcagcggcccaggctctcctctggctgccccagccaaactctatgtcaatccattggtcggtggcctgccagagtgctggtgcctgttggtggattcctctcagcgtcgagagtttttccctctcaggaaagggagagaagtggcagccacccatgtgttcttgcactgatgtgctcctctcgacgtccaacctcctgtgtgtctgcctgctagggtcccagagtttttttaggcacaggatagggcatggtgggccagggtgatcttgggaaatgcaacatttggtcaggaaaacaaaaatgcctgtcctcatctaggtccaggggcacaagcccaggtttggagccctagccagggaccccggcctcctctacccatcactttccttcaccttttctgtatcattcaaagggaccatgcccttcccttcccagcacttctcttctgtatcaataggtgatgtttttaaaatttcccaactctagtgcaggcatggtactagacatatacatagaaataaaaccacacttattcttctggctggcaagacatagtatttttgccaaattatgtgttgttttgaagcattttatgtacccctggtcatataaaaataaagctattttgttcagtacaaacagcagcattttctggattagaaagttaatcatcttaaaagatcatcacggatttttccattgcactcatcactaattgctttggcaaaaaatttcttatctcacgcatgacaaaatcagccgcagtatctcctagtaatttaatggtgatgatctttataaaggaaataagcacatcaagggaaaacataattttttttaaaaaaagagtaataaaactttttaaaagtcttttttaaaagactgcttttctaaaatagtaaaataaaactccaccaataaaaccaccaacaaaacagaaaagaaaaaataatgatatgatcggagctatttgatgaaagatggtaaattaaatttaaaatgattagaagagaaaaagcaatacctgtctcccgtaggtctcagtccaggttctgctatgcctttctcctggtgagccacctatttaagagtcgcttaaagcatatgttaatccaacaacagcagattaaaaaccaatgcaatctgaactatttgatctaaaaacataaataaaatttaaaacaaataaaagagaaaaagcagtacctgtgtcctgtaggtctcagtccaagatctgctctgactcccttgtggtgagttagccctttagaagtcacttggggtggggcatatgttaattccactaacattggttctggccaatgagtcaggaaggtggtaaatggcaccttttcttcttgctgatttctttcagttcctttggagtctggacattagtcctttgtcagatgcctagtttgtgactactgtttcctatactgtgggttgtgtgtttaccctgctgatatttcttctgccttgcagaagattttcggtttcattaggtcctattgatcttattctatttttatatttttgcgtttgcttttggggcattagtcatgactacttggcctaagccaatgtctagaaaagctttttggatgctatcttgtagcatttttagactttcaggtcttagatggaagtttttatatgctttgttaaagatcaggtgactgaaagtaccgggctttgtttctcggttctctattctgttccattgctctatgtgcctatttttatacttcctgcaccatttattgaataaagtgtcctttccccaattagtgtttttgcatactttgttgaagattagttgtctgtaagcatttggctttatttctgggttctctattctgttccattgctctatgtgcctatttttatacttcctgcaccatttattgaataaagtatcctttccccaattaatgtttttgtgtactttgttgaagattagttgtctgtaagcatttggctttatttctgggttctctattctgttctattgctctatgtgcatattttataccagtatcatgctattttggtgattgtagccttgtagtataatttaaagcctgccttcagatttgttctttttgcaaagtattgctttggatatgcggtcacgtttttggttttgtataaattttaggattcttttttctagttctgggaaggagaatgatgatattttgatgagaattctactgctctgtagatggctttggagagtatggtcactttcacaatattgattctacctattcataagcttataatgtgttcccatttgtttgtgtcaactgtgatttctttcagcactattttgtagttttccttgtaggaaacttacattaacctacttggttaagtatatttctaagtattttacttattaaaaattctcagggaaatgcaaagtaaaactgaggtgggaaattaaagaaaaataaaattaaaaagaaagggaaataagctttcttgtattaagctaacttgtcccagaggcagcaacaggcacagcccagacccaggaaaagtcttgataatattatttattgtattctggagactcttccagcactccttcaatgtagggagaagaaaaacaaattttcctttgttttatggtatgagtttatagattcttgttctctttaactagtaacttcaagtattctgttttatctaagaagtatggcaaaggtcatgagaagcctgagcaggcctgaactacagctctctaggcaccatagtgaagataaaccaatgcaagcctctttagagcaaaacctagataatagacatctgggttgcatagcaacagttatgtgcaatcctgagttatgaacctgttacaatttgattaactgtctttttcctgcctctgtatccctgctttcacaccactgtaagcttgcttcaagctggcccacccccttttgtgaagtgtgtataaaagtcaagtgctgtctttgttccaggccctgtctttggacgtgagtctgctgggcctgagagcactcaataaaagattctcctgttttaacccaaagcctctctctcatcctcctaaatcccacaacaaaaccacaatgagatgctatcttaatcttgctagaagcccataatttaaaagtcagaaaacaatagatgttggcatagatgtggtcaaaagggagcactttgacactgctagtgggaatttaaactagtccgaccactatggtaaacagtatggggattccttaaagaactaaaagtagaccattcattccagcaatcccattactggctatctacccaaaggaaaagaagttattccataaaaaagacacaagaatatggatgtttatagcagccgattcgcaattgcagtgatatgggaccaacttaagtgcccatcaacgaacgagtggataaagcaaatgtggtacaccatggaataatacttgataataaaaaggaacaaaataatgtcctttgcaacaagttggatggaactggaagccattattctaagtgaagtaactgaggaatggcaaatcaaatattgaatgttttcacttttaaatgagagttaagctatgagaatgcaaaggcataagaatgatataatggacttggggactcagggggaaaggttgggagggggatgaggaataaatgatgacatattgggtatattatacactgctcaggagacagatgcctcaaaatctcagaaattaccactaaggaacttttatccacataaccaaaaaccacatatattccacacactattgaaagaaacataaacattattttaaaaaataaagccacttttaaaattagcaaaataaaataaatatgtcttcagagtttagatattggatccaaattagacagatcaaatactgcctttactaaatattttcatgtcattaacaacttctaaaacctttcaaacagttttttgacatgtcttggaaccatccatttctagctaaggcctgggcacctgtgaaatagggccatgcccccccttatactgggaagagtaagatatttcaagactaagatgttttctacagctccatctttttctttaagctctacatcaaggacataattaaaattggttgtctcctaagtggtttactaaaaatgcatacttaagagttaccattataattaatatttgtatctaaagctacttaaaaattttcacacacaaatctgactgaacaagtaaaatatattttaagtcaaagtttataaaaggacatgagaacatagcttttatgaaaaaattagttttgtcaagtttagaggttttcaaatattttaaattcaggaaataaaataacaaaaagacaaaagaaaatggttgaacaacttagaaaaggtttgttaaaattcatcttataaaacaatctacatgtaaaaagtgggctaaaatttgaaagagattatttaggttttccataaattaatccagaaggggtaggaagtcttaagaatgaggaaggacaggaggaaggggaggtcatcctgacactgcagaggcagaagtgcagctgaaggtatgaaggctaagaggggaggggagtttgagtgctgctgcctggctgtcagagcagaggagggtcctgggcaccagacttgaggaagggatgaaaatgctgggcagacctgtagtgggcccttgagatggcagatagtggtttccagagagagggccattgttttccagtgcccagcactgagcagagagagttttgggcagtgtaaaaaaaaaaagagaacttacctctttctcgttttagaaaaagaacagtctaagaatatcagcagggaaactctcagtgcttcaaggggttaaacgcccttttggctttcttgtgttggtttcatcatagaggaggagaaacttcttggaagtgttcctaaaaacacaacacgtctgcttctcctttcaaaaaaggaagtgctaaaacacgaacactctagatccaaatattaatacggatgtctaaatgcttccgttttccaaggggcagaaagctaaaggttgtaacctattcatttcagtcaaagttggtgaaagggaagcaaaggaactgggtggggcttggaaggatgacgaagctcaagctcattggccagcaacctctctcctgggggcgggaggggtgagcatacgtcattgctttggcttctataaaatgaggaggactcaccgagtgtgaagagtccttctggtgattgcagctgagagcacactcacgacgttctgcaaggattctctgattatgattctgaagggaaaagcgatggaatggacagcagagattgtaattttctttatcttgaattacggaagaaagtatctaggacagaaatccacgacaagtccttggaaccagcagatctcttcgttcacggagacgttgacgtattctctattgaagaagattcttaccttcttactggacaaggttttgtcagttctgcgtgactggattgtccgggagactctgaggaaactgatgtcacatgtttttccaaagaagatgtttctggaaccaacaactgtgattgtggtttgaggacttctgagagttccagtacaggaaataagcagaacatcagctggaggctaaacggatccagacttcactcttcacttcccttcctattcagtctattgtgcctgctgactgagaagcttggctggtatgtgagcaaataaacggaactattcagaaggagatgttgacatattctgtattgaagaagatccttatcttctcacctgacaaggttttgtcagttctgtgtgactggattgtccggaagactctgaggaaactgatgtcacatgtttttccaaagaagatgtttctggaaccaacaactgtgattgtggtttgaggacgcctgggagttccggtatgcgaaataagcagaacatcagctggcggctgaagggatgcagcctccactcttcacttcccttgccattccatctattgtgtctgcctgactgagaagcttggctggtatgtgaggaaataaacggaattataaacaaggagattgtttctcatctacttcattctgttgtggcttttctattttggggttcagggtgtgtgacaaggaccaaggagatgaaaggtttcatgatggagaaagcccaggcaatcagattgaagagctatccacagggaatcttggctgctgaggggctgcaccctgcaacggactgaccatatgacagaaaagggttttaaaggctcaacttctggactgagaacccagagtaatttgggaacctcctctgtgaggagatatgaaagctgggaatcatgacatccctaggaatggaaggcacatttcctgatggaaggggtgctttggaaaacaggagcagagtagacacagcagccttgtggatacgggtgggcagcatgcatgggtgatgtgaacgtggagtgtttgtgatcgaaactcaaaatgtctgacaaagtgaaaacctagaaaccacaatgaggaggaagagtttgtgagggcaatcactctccccatgtgtgaaaatcgggggctcttaaaatctcatctggagaggtgcagtctaccaaactctgggactttagcctccccttttaaaaaaccgtgcatcaataccaacgtccgaaaccacagaaataacacctggcttgcatggagacaaggacaaaaagccgtcatgatgagttgttctgctcacttgctgcctctgttcagtgcacaggatattgtccacccactagcaggctactgcaagagaagtgtgcaatatgttccctatgtgccatatatgtgccatatggcccatatgacaactgagtcagaaaatatctgatgccctcagagttacactccacctggagcttgcccccagccatccaggacctaggctccctaccctgtccaattttctggtgttttgggggcttcattctctaaggtgtgcccactctttactcaaaccaaaacacccacatattcctgcccatgaacaaccaatcaaccacttctcagttccacatcctgctgttgggtctctagtggtgacactgtaactcccaggtcatagtggtgacactataacacctagctaaattgatgccttgtctctaggaggccatgggctcctgcaggtctcatctgactctctgtagccttccctgacaatgctcacaatacccaagccagagccacattgacagcaagctgctctcatcttacctttgccagacctggccactggaaaaggctgaccctcatcctgcaatgcctatacctccaacctttgtctcaagctggtgtcctggagggacttctaagcagaaaacagattcagactcccatcctctcctgaatggcctcatatccaattctcagaccctcagccttcattgtaaggacacttcatccatgcccttgagtattctgtctgcactgtgtattctgcaatagattctcctccctctgcgaccctcaactccttccgcagactttttgttttcttgatcatctaccatagtcttccactgggacactgccaagcccattctggagagtgagttgtgcaagtacactgccccccatctacctttcgggaggtgtatacacccttctttctcccaggtctggaggctttctattttcatcctgaggcatctccacctgctcttggattcttcaaattgacaaccaccagttaacaagaactatgtgtcaccaaatagccaaacaatggcaattacaaaaataaaattaatagctgtaacccccattagcaaggatacacaaatcaaatcagggatagtgggtgaggaagtctgcctaacattcaaggaaggattctgaagtgatacaaaatcattgcctttgctatctttagaatggacactttcagccaggcacagttgctcagcctgtaatcccagcactctgagagccccagttgggtggatcacttgaggccagcagcttgagaccaccctgggcaatgtgcagaaaccccaactctactaaaaatacaaaaatagccagttattgtggcacatgcctgtaatcccaactccttgggaggctgaggcacaagaatcacttgaatctgggagccagagtttgtaatgagcgaagatcatgccactgcactctagcctaggcattagagtgataatctgtctgtggaaaataaaaacattcctcttcaaagttttcttctttaaatcataaatgttggaattaatatatcctctttgaaactcactttcttcaagcttctttatttgatggtagtaaatctttgttaagctttatgaggcaagagtaatggaagaagcatattatatatatttatactctaacctcagtgcttgttctagcaagctcaggcatgcgtgaatgtgcccaggcatgttccagcccataccttatatcctttccttattgggaaatgctgttactcctataagcattcttgtaagcaacttcctctttttctttgtctccactatctttacctattgaggacagttttaggttcttagccagttggatgtagcatagactgtgaggtccaaccccagccaatggagatagcacacagcagtagcgacctcatgcttaacagataaatattcctgtctccctttgtttggggtgctctcagctgatgagcaacaccctttctaaagaaattaaagttgtcttgctgagaaaacttttggtctaaatgctgattcttccttgcagcactgaagaagaagcaattatttccaacactttctcatacacaaaaaaagaagaaggtggaagaaaactttcttgtgcaccctatccctcactcagaaagacaacagaaggctcctagtggcaagccctagaggattcatttcttttgggaaccctcttggctgggatactaggactcaggtcaaactcagcattttcagtgtgtgggaagtgtgcttgggtttcactgttacttccaataatgtgatttggtccttggggttcaccaaattttggtatggagtggtgaaccctgttaagtttaagtgtctataaaattaacaaagcaaaataaccattctgccccatggttcagagaccaaatattgtgtaggaaatgctttagcgagagaaacagagaagaataaaaaatgtcctcaagcgctgcattatttcttgttatcgtccagatcttagaggaaaggctttcattttccctcattcagtatgatattagctgtgcatctgtcatttatggcttttattatgttggggtatgttccctgtgtatgtagttttttcagggtttttgttatgaagtgatgttgaactttatcaaacgtttttcagtttcagttgaaacgatcatatgctttttgtccttcattctcttgatatgatgcatcatgttgatgatttccatatggtgcactgtccttgcatcctgggcatgaattccacttgatcatgacaaatgaatttttaatgcattcttgaattccgtttgctggtattttgttgaggatttttgcatcaatattcatcagagatattggcctgcagtttctttttttttcttttttctttgttttgttgtttgtttgtttgtttgttttgatgtgtctatgtctggttttggtatctgggtagtagtgttccatccccttttattttttagaataatttgaataagactggtgttggttctttaaatatttggtagaattccgaagtgaagtcattgggccccgggcttttctttagtggaaggctgtttattatggcttcaatctcgttacttattattggtctattcatgttttgaatttgttccttatttaatcttggtaggctgtgtgtatctaggaatttgtccatttcttttagattttcaaatttattggcacataattgcccattgtagcctctaatcgtcatttgagttcctgcagtaccaattataatgtctccttcttcatttttgattgtatttatttggatcctgcccctttttttcttacttaggctgcctaataatttcttaattttgttgaactttttcttttgtttgtctcgctctgccaccaggctggagtgtagtggtgtgatcttggctcactggaacctccgtctcccaggttcaagcaattctcctgcctcaccctcccaaatagctgggactacaggcaagtgccaccactcccagctaatttttgtatttttagtagacacgggttttcaccatgttggccaggatggtctcgatctcttgacttcataatccacctgcctcagcctcccaaagtgctgggattacaggcatgagccactgcgcccagcctaattttgtttaaattttcaagaaatcaacttcttctttcattgatttctgtattttttatttccattttatttatttaaactctaagctttattctatcttcttctcattttagctttggtatgcttattgcctctctagctctttaatgtgcattgttagattgtttatttgaagttcttcctctctacaccataagacgtaagcatgtcctcattatgtcataagatgtaaccacttacagctataaacttccttcttagttctgcttttgctgtatctcataggctttgttatgttgtgtttccattatcaattgtgtcagaaatttttcaatatttttcttaatttcttcattgagcaactgatcatttgggagcatatttttaaacttccatgtacttacatagtttccaaaatacctcttgtgatcaatttctagttttattccactatggttcaagaagatgcttgatattatttcaattttttttcacattttaagatgtgttttgtgacctaacatatggtctactttttttttttattaaactttaagttgtggggtacatgtgtagaccgtgcagttttgttacataggtatacacgtgccatggtggtttgctgctcccattaacctgtcatctacattaggtacttctcataatgctatccctcccctaacctccaccctctgacaggacctggtgtgtgatgttcccctccctgtgtccatgtgatctatttttgagaatgatccatgtggattagaatgctgtggaaaagactttggattcctaatatccagggagggagacgatgatattactttcaatatcacacgggtgtacacactctctgtgacattgttcctaatatccagtggaagagaggatgatataacacccagggagggagaggatgatattactcttaatattgcagggtgtgtacccatgcctatgatattgttcctaatatcaggagggggagaggatgatattactcagaatatggcagggggtgtacacacactctgtgacatggttcttaatatacaggggagaatgggacaatattactctcaatatcgcagggggcgtacaaccctgtgatttgttcctaatatacaaaaggggacagtatgatattgttcctaaaatcgcagaaggtgtacaacgccctgtgatattgttcctaatatccagggcgggagaggatgatattacccccaatatcacagggggtgtgcactttccctgttacattgttcctatgatccgagtggggggaaatgacattagtcccaatatcgcaggatgtgtacactactcccccatgatattgttcctaatatcaagggggagagaggaggatattactcccaatatcgcaagggaggtacatcctccatgcaatattgttcgtaatattcaggaggagagaggaagatattactctcaatatcgcagaaagtggacacccaccctgtgatgttcttcataatatccagggaagcagacgattatatgactttcaatatcgctgggagtgtacatcccttttgggatattgtttctaatatccaggaagggagaggattatattacttccagtattgcagccagtgtacacatttcttgtgatattgttcctaatatccagaaagggaaaggatgatattactcccaatattgcaggtggtgtacacccccctctgatattgttccttacatcaaggaaaagaaagaagaatattactcccaatatcgaagagagtgtacacccctcctgtgatattgtatttaatatccatggggaaagaggatgttgttactcccaatatcgcagggggtttacacccacactgtgatattgttcctaaaatccagtgaaggagaaaataatattgctcccaatattgcagggtgtatacaggccctcccccgttatattgctcctaatatccagcggtggagaggatattactttcaatttttgcagggagtgtgtaccccctctctgatatttttctaatatcaaggatgggaaaggatgccattactcccaatatcgcaggaggtgtacatgccctgtgatattgttcctaatatccagggaggtagaggatgatattactttcaatattgcaggggctgtacaccctctatgatgttgttattaatatttaggttgggagaaaatgatatttttcctaatatcctgggaaggaaaggatgatattactgtaaatattccagggagtgtacaccttcctaatattctaatattgttcctaatatccaggggtgggagaggattatattactcccaatatcgcagtgggtgtacacccctcctgtgatgttgtttctaatatccaagcgaggagaaaatgatatcactctcaataccgcagggggtgtacaccttccccatcatatcgttcctaatattcagagggaaagaagatgatgttactttcaatatcgcaggggttgtacacaacccctgtgatatttctcctaatatccaggaagaaagaggatgatattgctcccattatagcagacggtatacgcctccctgtaacattgtttctaatatcaagactgggagaggatgatatcacttccagtatcgcaaggggtgtacacctcccccgtgatattgttactaatatccagggggaagaggataatattactttcaatattgcaggggctgtacacccccgtgatattgttgttaatatttaggttgggagaaaatgatattagtccaaatatcgcagagagtgtacacacttccgataatattgttcttaatatccatgggggagacgatgatattacacccaatatcgcagggggtgtagtctccccttgtgatattgtccctaatattcagggaagtaaacgatgatgttagtgtgaatattccagggagtgtacaccccctttgtgatattgtcctaatatccgcaggagagaagataatattactcccaatatcgcagggggtgaacacaccccctgtgatattgtttctaatatccaagcgaggagaaaataatattactcccaatgtctcaggggatatacaccttccctatgatattgtttctaatattcaggtggaaaacgggtgatattactcctaatatccaggaagaaaggggattatgttactccccttatagcagggggtatacacctcccctgtaatattgttcctaatatcaaggctgggatatacgtggggggaaggatgatattactcccaatatcacaggggttataaaaccttctgtgatattgctcctaataaccatggcggaagaagatgatattactcctaatattgcaggaggtgtacactcccccattatgttgttcctagtatgcagaaaaggagaggatgacattattgccaatatcgcagggtgtgtacaccacccatgatattgttcctaatatttagagggacagaggatgatattactcccaatatcgcagggggtgtacacgcatcccctgtgatattgttcttgaaatcgaggggaaagagaattatatttctctaaatattgcagagggtgtacaccgccccctgtgatattgttcctaatagccgggggcggggggagataattaaattactttcaatatctcagagagtgtacatcccccttgtgacattgttcctaatatccagagcaaaagagaatgatattcctcccagtatcgcaggaagtgtacatttaacctgtaatattgtttctaatatccagggggaagagaatagtaatactcccaatatcgtaggggttgtacaccttttctgtgatattgttgcaaatatttagaagagagagagaatattactcgcaatatcacagggaatgtatacttcccctgtgatattgttctaatatctagaaaaagagaggataatattactcctaatattgcagggggtgtacacccccacttgtgatattgttcctaatataaaggaaggtcgaaaaacaaacggggagcccagggggaaggaaggcaggcgaggaagaggcagcgccggggcgccggagggagcagccgggccgcggaagcgcgagcacgagaccggtcgcggtcgcagtcgcatttttgccgttgtcgcggccgccgccgccgaggcttacccggggatgtctgagcccgcgcctcgcggcccccaagctccacgctgcgcccgctgtcccggcctctaagggccgccacgtccctgcggcgcgcgcaggcagaaagcggcttcgtgccggcggagggggcccgggcgggccgggaaaggctgccccaggccccgcgcctaccccatcaccgcggccggcgccgggccgggaggatgagcggtgtggggctctgaagcatggagggggttttgtacaagtggaccaactatctcacaggttggcagcctcgttggtttgttttagataatggaatcttatcctattatgattcacaagatgatgtttgcaaagggagcaaaggaagcataaagatggcagtttgtgaaattaaaggtgacagctttggaggggaccacccttgattggatacataaattctgttcattcagcagacaacacaagaatggaattaatcattcctggagagcagcatttctacatgaaggcagtgaacgcagctgaaagacagaggtggctggtcgctctggggagctccaaagcatgtttgactgatacaaggactaaaaacgaaaaagaaagaagtgaaaccagtgaatcgctgaaaaccaaaatgtctgaacttcgcctctactgtgacctcttaatgcagcaagttcatacgatacaggaatttgttcaccacgatgagaatcattcatctcctagtgcagagaacatcaatgaagcctcttctctgcttagtgccacgtgtaacacgttcatcacaacgcttgaggaatgtgtgaagatagccaatgccaggtttaaacctgagatgtttcaacggcaccatccggatcccttagtttctcctgtgtcaccttctcctgttcaaatgaggaagcgttctgtcagccaccctggttcttgcaccagggaggagtagccactgtataaaagaaccagtatctgcacttcaccgactctcccagcgacgccgaagaacctactcagatacagattcttgtagtgatattcctcttgaagacccagatagacctgttcactgttcaaaaaatacacttaatggagatttggcatcagcaaccattcctgaagaaagcagacttatggccaaaaaacaatctgaatcagaagatactcttccatccttctcttcctgaagaaactgtagtgtccaactttctctaagtattgctatgcaaaagctgctgtaattgaactattgttatagggagtagttttttcccttaggactctgcactttatagaatattgtaaaacagacaaacaagaaaacaaaccacatacttttgaagcgtgttttatctttatatagtttgtttgcaagagtattttcctaataacttcacagtatgaatgtgcatcttttttttctttttttaacaaatgatggtgtaacattttgacatccataaggacaaatgtagatatttttctaaaaaaccgtgaggggactgacagcttggtcagggtgtattgtagcttataaacatgaaatcttacaaggtttcagtttgacagaagtgtgatatatgtaacttgtgccatggaccaaatggtcactttaccacagctaaaaatgagttatgatagcagcttgatggtgattgcattgtattcctttaatcaaaaaggaaacgcaatattctaagtatctttagcccaaataccatgacatattgagcatctttaaataaccagactgtattgtccttcatatgtgaagttgacactactgatttgtcaataccaaattttgggttaaagtgtttaatttttatttatttattttcttgttgcctcaaaagatgattgcattctaacttttgtgacctaccaaatttaagatgtgtatacattgttctttacgttgttctagaaaagagattttaatgctgtagtgacttagctcacttacatcagagaaataaacaactttcaatggaaaaaaatatatataaaggaaggaagaggatgatattacttctcatatagaaggggttgtacaccccccttgtgatattgttcctaatattcagggagggagaggattatattactcccaatatagcagggagtgtacacccccccccccgtgataatgttcctaatattcagggaagcagaggatgatattactttcaatatcacagggggtgtgctgtccccctgttatattgttcttaatattcaggggggagaggatattattatgcccgatatcacaggagaagtacaccccacaagtgatattgttcctaatatccaggggtaaagaggatgatatcgcaggtggtgtacacccctccccgtgatattgtttctaatataaagaaggagagagcatgatattactcccaatatcgctggaggtctacaccccccttgtgatactgttcctaatatccaggaagggaaacaatgatattgctgtgaatattccagggggtgtacacccctttgtaatattgttcctcatatccagggggtagagaggatgatattactcccaatatcgcagggggtgcacggccccactgtgatattgtttttcatatccaggaggggagaggatgacattactctcaatatggcagggggcgaacaccccctgtgatattgtgctagttaggttgggagaaaatgatattactcccaatatcgcagggggtgtacaccgctcctgtgatattgttcctaatatccatgacgggagaggatattactcccaatatcgcagggggtgtacctctcccctgtgggattgttcacagtatccaaaagggaagaggatgatgttactcccaatatcacagggagtgtacaccaccattgtgatattgttcctaatagccagggaagaaaacgatgatattattgtgaatattacagggggtgtacacaccccctgtgatatggtttttaatatacaggttggaaaaggatgatattactcccaatatcacaaaaggtgtacacacccccccatgatattgttcttaatacttcggtggggagaaaatgatattagtctccatatcacaggggtgtgaactcctccggtgatattgtttttaatatcaagaggggaggagatgatattgctttcaatatcgctgggggtgtacatccctcctgtgatattgttccttatatccaggcgaggggaaaataatattactcccaatagtacacaccccatgtggtattgttcctaatactcagggggaaagaagataatattactttcaatatcacagggtttgtacacctttcctgtggtatagttttcaatatccagggggaaggtacatgatattactcccattgcagcaaggggtgtacacacctcctgtgatattgttcctaatatccagaagtggtgaggatgatattactcccagggggtgtacaccccacctatgatattgtttctaatatccaggggaaaagagtgtgatattatgcccaatatcgcagagggtgtacacttatcctgggatattgtttctagtatttggggagggaggagaggatgctattattctcaatatcgcagaaattgtacacccccgctgtgatattcttcataataatcagggaaaaagaggatgatattactaccaatattgcagggggttacacttcccctttggtagtgttcctaatatccaggaagaaagaggatgatattaatcccattttccaggaagtgtacacccaccgtgtcatgttgttcctaatatccagcagggaagaggatgatattactcccaatatcggagagggtgtacacttcccctgttatattgtttctaatacccagggggaagaaggatgacattactgccaatatcacagggtgtgtaccccaccctgctattgttcctaatattcaaaaggaaagatgaaaatattactcccaatatctcagggtgtgtacacctctcctgtgatatcgttcctaatatccacaggaagagagaatattactctcaatattgcaggggggtgtacacccccctgtgatattgttccaaatattcgggcggggagaggatgatattagtcccaatatcgcagggggtgtgcaccaacctgtgatattgttcctaatatccatgcgggggaggacgatatcactctcaatgtcgcaggaagtgtacacctctcttgttatatttttcttaatatccaggagggaaaagatgatattactgccaatatcgcagggtgtgtccaccccccttttatattgttcctaatatccaatggaaaagaggatgacattgctctccatatcccagaaggtgtacaacgcccctgtaatattgttcctaatattttgggggaagagaggatgatataacttataatatcacaggaggtgtacaccacccctatgtattgttcctaatatcctttaagggagaggatgatattactcccaatatctcaggtggtgcctattccccctgtgatattgtttttaatatccaggggaagagagtatgatattacgcccaatatcgcagggggcatacaccctctctgagatattgttcataatatatagagggagagaggatgatattacttccaatatcagaggtggggtacaccccccggttatattattcttgatatccaggaggggagaggttgatattactggatatatagcagggagtgttcacatcttctgtgatactgttcctaatatccagaaaagtagaggatgatattactcccaatatcgcagaacgtgtacacctccctgtgatattgatcctaacattcaaaggggagaggatgatattactcaaaacatcacagggcatgtacactcccctgtgatattgttcctagtatccagaagggagcaagataatattactttcaatatcgcagggggtgtacacccctctttggtatgtttcctaatatccagaaggaaagagggtgctattactttccatattgcaaggggtgtacacccccctgtggtatggttcataatatccagggagggaaagggtgctattattccccatatcgcgaggcatgtacaccctgctgcggtacggttcctaatatccagggggaaagaggatgctattacttcccatatcgcggggtgtgtacacccccgtgtggtatgttttgtaatctccgggaacgaagagggtgttattacccctcatatcgctggaaatgtacactcccctgtggtacggttcacaatatccaggggattgagggtgctattactccccatatcgcggggggagtgcacctccctgtggtatggttcgaaatatccagggtaagagagggtgctattattccccattttgcaggaggcgtacacccctctatggtatgttttgtaatatcccaggtaaggggtgctattgagagaagagagcaaaagaccccccccatattgttctgtattattttatactcagtacctgttttaagaagaaacaaggaagcgaaaccaaaggcaggcagcccggcgccaggcaccagatccaaaaccagacccgaaaccaggcctgggccttcctgaccttagcctgaaagttaaaattcaacccatgacctagcaactgatgttatccatagattccagacattgtatggaaggacattgtgaaatttcttgttctgttctgtttcactctgagtactggtgcatgcagcccttgtcacatacccactagattgctcaatcaatcatggccctttcatgtaaaaaccttagtgttgtgagcccttaaaaaggacagaaattgtgcactcaacaagcttggattttgatactctagtctgctgatgcttccagctgattaaaagccacttccttcactacctcggtgtctgtgggattttgtccgcggctcctcctgctacactgtgactccccttatagagaggggtgtacacccccctttggttcctaatatccagcgggggagtaggtgctattactccccatattgcggggagtgtacacccccttgtagtacggatcgtaaaatcaaggagggagagaaggtgtaattatccccatatcacagggagtgtacacccctttgtggtatagtttgtaatatccacgacgggagagaatgctattactccccatatcgtggagggtgtacaccgccctgtagtatggttcgtaatatccggaaggggagaggttgctattactccccatatggtgggaagtgtacacccccatgtgatatggttcataatatccaggggggtagaggatgatattacccacaatatcatagaaggtgcacacccttttgtgatattgtccataaaatccagaaggggagaggatgatattacttccaatatcacagggggtgtgtagccccatatgatattgtttgtaatatcaaggtagggagaggatgctattccttacaatagctcaaggggtgtaaccttcttgtgatattgtttgtaatatccagaaggggagaagataatttttttattttaaaagtaaactttaatgtcaaaaatgcaaacttgagaagggcagaaagatcaaacagaaggctgccacttcacaattggagggttgcacagtggccgggcagaggcgctcctcactccccagacggtgaggcagccgggcagaggtgctcctcacttccgagatgttgcaggagccgggcagaggtgctcctcacttcccagaacagggggctgccgggcagaggtgctcctcactgcccagacggtttgcaggcctggcagaggcactcctcacttcccaaacggagcagcggcaagccagaggcgctccacacttcccagatggtggggcagccgggcagaggcgatcctcacttctcagagggtagggcggcccagcagaggcgctcctcacttcccacatggtggggcggcaggctagaggcgatcctcacttcccagacggtggtgtggccatgcagaggtgctcctcacttcccagatggtgtggccgccgagctgaggcactcctcacttccctgacagtggggcggctgggcagaggcgctcctcacttcccagacacttggactccgggcagagactctcctcatttcccagatggtggggctgccgggcagaggcgctcctcacttcccagacggttcagaggccgggcagaggcgctctggggagaggataatgttactcccaatatcgcagggggtgcacactccctgtgatattgttccgaatatccagagggggaaaggatgatatagctcccaaaatcgtggggagtgtacacccccctgtgatcttgtttgtaataccaagaagaaaagagaatgctattatttccaatatagcagggggagtacaaccccctgtgatattgttcgtaatatctagggggagagaaaattatattagtcttaatatctcaggggacgttcatccccctgtaatattgttggtaatattcagaatggagaagatgatattgttcttaaaatacaggaaaaaatatgataatattacttccaatatcgaagggggtgtacactctcctgtgatattgttcccaatatccagaatgaaagaggatgctattactcccaatatcccagggagtgtacacccctttgccatattgttcataatatccaggggaagacaggataacattactcccaatatcaccgggggtgtccacccactagtgatatttattgttcatcatatccagaaaaggagaggatgatattactcccaatattgcaggtggtgtacggtccctgtgatattctttgaaatatctagaaaaggagaggatgatatcactccgagtatcacagggggtgtacacccccctgtgatattgttcgtaatatccaggggagaaaaggatgatataattgccaatatttcaggggatgtgcacctccctgtgatattgtttgtaatatccaggggtggagaggatgatattactcaaaataacgtaaacatcctgtgtgtacatcccctgtgatattgtttataatatccaggggggtagaagatgacattacccccaatatcacagagtgtacacacccctgggatactgttcataatatccaggcgggaaagaatgaactacttccaatatcgcaggatatgtacacccccctgtgatatatttcctaatatttatgtgggtaaggatattacccccaatatcacagaaggtgtacatcctctttgtgatattattcctaacatccaggaaaggagagaatgatattactcccagtatcgcagggggtgtacaccacccctgtgatattgttgctaatatccagggggagaggataatattactcccaaaatcacaggggacgtacactcctcctgagatattgttcctaatattcatggggaaaagaatgctactactccaaatacagcagagggtgtacaccatccccgtgatattgttttttatatccaaagggtgaaaggctgatattactcccaatatcgcagggggtgtacaggccccccatgatatcattcttaatatccagggaggcaaagaatgatgttactcccaatattgcaggctgtatacaccccccgtgatattgttcctaatatccagagtaagagaggatgacattgctcccaatattgcaggggttgcacgcacgccctgtgataatattactcccaatatcaacagtgggtgtacactcctcctgtgatattgtttgttatatctaagaaagaagaggatgatattactgtcaatatcacagaaggtgtacagccccttgtgatgttgtttctaatatccagcggtgagaggatggtattactcgcaatattgtagggggtgtccaacggccctgtgatattgtttctcatattcaaaaaggaaaagaataatataactccaaatatcgcagggtgtgtacacttccctgtgatattgatcctaatatccaggaagagagaggatgatattaatcccaatatcacagggggtgtacatcgcttctgtgatattcttcctaatatccagggggggaggggatgctattactcttaaaatcgcagggaacttacactcccactatgatatttttcctaatatccaggaagggagaaaatgatattactcctaatatcacatatcacaatgggtgtacatctccccgtgatattgtttctaatatcaaggatgggagaaaattatattactctcaatatcgcagggggtgtgcacacctcctgtgatattgttcctagtatccagcggaggagatgatattactttaaatattgtagaaggtgtacaacccccctttgatattgttcctaatatccagggggaaaggagatgatattactcctaatatcgcaggggctgtacaaccctatgtgatattgtttcttctaatatccaggggtggagaagataatattactcctaaaatcgaaggggacatacactccccctgtgatatttttcctaatatccagaaggaaagaggatgatattactcctaatattacaagaaatgtatacctgtcctgtgatattgttcctaatatccagaggggtaaatgattatattactcccaatatcgcaggggtgtacaccttccctgagatattgtttctaatatgcagtggaggagaggatggtattactcccaacatcacaggagatgtaaactccccttgtgatattcttcctaatgttcaggacgaaggagggtaatattactcactgtattgcagcagggggtgtagagccccctgtgatattgtttttaatattcaaggttggagaaaataatattccttccaatatcgcatggggtgtacacccttctttttatatagtttctaatatctggggggagaggatgatattactcccaatatcgcagggggattacacccccactgtgatattgtttttaatatccagggtgggagaggataatattactccaaatatcccagggctatacaccctccgtgtgatattgtttctaatatccagaggaagagaagatgatattactcccaatgtcacagggtgtgtacaggccttctttgatattgttcttaatatccatgagggagaggatgatattactcccaatatcgcaaagactgtacaccctttctgtgatattgcttccaatatccagggagggagaggatattacactcaggatcacagggggtgtacaccccaacctgtgatattgtttctaatatctagggaaaatgagggtgatattactatcaatatcacaggaggtgtacactcccttatgatattgttcctaatatccaggagaatgacaggataatattactcccaatatcgcgggtggtgtctccccccactccgtgatattgttcctaatacccagagggggagagaatcatattactcccaatatcgcaggggatgtacacctacatccggcggagtagaagataatattactcacaatatcgcaagaagtgttcaccttccctgttatattgttgctaatatccagggagtgagaagatgatattactttcaatactgagcgtgtacactacccctgtgatattgtttctcatatccagtagaggagaaaatcatgttactcccaatattgcaggggtgaacacctcctttgtgatatttttcctaatatcaggaaagggagagtatgatattacccttaatattgacaggggtgtacacccccctttgatattgttccaatatccaggggggcagaggataatattattcccaatatcgcagagggtgtacaccccccgtgatattgttcctaatatccagagaaataaaaaatagtattatttccaatatcacagggcgtacattttccctgtaattttgttcctaatatctggggggtggggtggcaggataatattactctcaatattggagagggtgtacacccccctgtgatattgttcctaatattcagggtgggagagaatgatgttactcccaatatctcaggagtcgtatacacccccttgtgatattttttctaatatccaggaggcagaggatgatattgctcccaatatcgcagggggtatacacccgagctgtgatattgtttctaatatgcaatatgggggaaggatgattttactttcaatatcgcagggaatgtacactttccttgtgattttgttcctaatatccaggggtggagaagatgctattactatattactcctcatatcgcaggcggtgtacaactccctgtgatatggttcagaatatccagagtgaaaaaggagggtgacattactcccaatatcgggggggtgtacacccctttgtgatgtggttggtaatatccaggggggcagatgagggtgatatcactccccatatcgtggaaggcgtccacttttttgtgatgtggttctttatatcccgaggggagaaggtgatattactccccatatcgcgaagggcatacacccccctgtgatatagctcataatattccggagagtggaggaagatactatgccctatatcgcgggtggcctacaaccccctatggtttggcttataatatccaggggggagagggtaatattgctccccatattgtggagacgtacagccccctgtgatatggtttgtaatatctttggggggcgagggtgatattactccccatatcgcggggagcatacacccccgtgatctggttcatagtatctcaaaggaagaagttgatgtgtacaacttaagggaaaaagttgaagtgaagtgtacacacgccctgtgacgtggttcataatatccaggcgggggagaggagagtgatatttactccccatatcgcgggtgttgtaaactcccctgtgatatagttcataatatccaggggagagaggagggtgatattgctcctcatatcgcgaagggtgtacaaccccctgtgatatggttcataatatccagaagggtagaggacgatgatattactccacatatcttgggaggtgtgatatggttcgtaatatccagcgatgagagaatgatattactccccatatcgcaaaaggtgtgatagggtttgtaatatcctgagggggagagggtgatattaatccctatattgcagaaggactacaccctcccatgacatggtttgtaatatcccagggggtagagtgtgatattactttccatatcacagggggtgtgatatgattcgtaatattcgaagggggagagggtgacactactctccatatcacggggtgtgtgatatggttcttaatatcccaggggttagaggttgatattaccccctttttggggggtgtgtacaccccctgtgatatggttcgtaatatcccgggggagacagggtgacattattccccatatcgaggggatcgtacaccccctgtggtgtggttcataatatccctagggggagatggtgatattactccccatatcagggggcgtgcactcttctgtggtataattagtaatatccagggggcagaggtcgatattcgtttccatatcatgaagggagtacacttccctgtgatatggttcctaatatccaggggggagagggtgatattattccccatattgcggggggacatacaacccctgtgatatggttcataataaccagaaaagaagagggtgatattaatccccgtattgcagagggcatacaccccccctgtgatatggtttgtaatatctaggggaggaaaaggtgatattactttccatattgctgggtgcagacacccctttatgatatggttcataatatccaagttggagagggtgatattacttcccatatcatgggaggtatacccttccctgtgatatggttcgtaatatccagaaggggagagattgatattactccccatattgtggggggcgtacaccttcctgtgatacggtttgtaatatctaggggatatagtgggtgatattactcaccatatcacgggggttgtaacatggtttgtaatatccaggggaggagagggtaatgttactccccatatctcggggcatgtacaccctcctgtgacatggttcgtaatatccaggtcgggagagggtgatattactcctcatattgccgggggtgtgttatggttcataatatcctggggaaggaggctgctatcactctccacatcttgggggatgtacactctcctgtgatatggttcataatatccagggtgggtgagggtaatattactccccatatcgcgggaagtgtacatacccctgtaatattgtttgtaatagaagagagggtgatattactccccacatcgcgggtggtgcccacccccctgtgatatggtttggaatatccagggggatgaggagggtgatattactccccatatctcggtgggagtacatccctctttgatcaagttcataatatccaaaaggaaacaggagagtgatattactccccatatcgccgggggtgtacacgggagggggagtacacccccggcgatatggtctgtaatatccagggaaggagaggagggtgatattactcaccatatcgcaggtggtctacatttacctgtgaaacagtttgtaatatccagggggggaaatgagaatgattttttttttttgagtctcactgtgtcacccaggttggagtgcagtggcacgatcttggctcactgcaacccccgcctcctggactcaagcaattctcctctcccagcctcctgaatagctgggactacaggcgcaccccacaacgtctggctaatttttgtatttttattagagacggggtttcaccatattggccaggctgatctcgaactcctgaccctgtgatccatccgcctcggcctccaaaagtgctgagattacagatgtgagccaccacgcatggcccaaggagaacgatattactccccatatcccagggggtgtatatccccctgtgatatggttcagaatatccggaaggaaagacagggatattacttcccatatcgcaaggggtgtgacatggttcgtaatatcccatgggggagagggtaatattactcttcgtattgtgaagggcatacactcccctgtgatacagttcataatattccggggagtagaggaagatattatgctccatatcgcgggtggcataagccccctgtggtttggttcataatatccagggaggagagggtaatattactccccatattgtggggacgtacaccctcctgtgatatggtttgtaatatcccagaggggagagagtgatattactccccatattgcagggacatacacccccctgtgatatggttcaaaatgtcttttttttttgaaggactggttctttatttcaaaaagacacttgtcaatattcattatcaaaacagttgcactattgatttctctttctcccaatcggccccaagtagaccacatcaaaggagagtacatattaagccaataagctgtaggatgtacacctaacagacctcctagaaaccttaccagaaaatggggacagggtagggaaagaaactttaaaagatcaacaaactgccagcccacggactgcaggggctgtcacagccagatggggtggccagggtgccacaaacccaaagaagcaaagtttcaaaataatataaaatttaaaaagttttgtacataagctattcaagatttctccagcactgactgatacaaagcacaatgagatggcacttgtagagacagcagcttcaaactcagaaaagggtaatgagatgagtttcacatggctaaatcagtggcaaaaacacaatcttctttctttctttctttctttcaaggaggcaagaaaagcaattaagtgctcacctcaacataaggggaacatgatccattctgtaagcagttgggagggggtagagatggaacaaaattttggtctcagaggtcttgccatcttaatttggtcacttctaatgaaaaaaataaaaaatagaaataacattatccaaaggtatcttaaagctgaaaacttgaacagcacattttttgttgttgttgtttggctaactcctcctggaaccacctttctggcttagctagtactttgtacagagcaatgaggcttcccatagtggagtctccctgggctctgtttggctctcagcaaggcaggcctataccttttcctctcctccatggagagaggaatatgcattaaggtgaaaaatcaccttccaaaagtgagaaagggattcgatcgctgcttcagggctgtggtattatatggaatgttttacaaaaggttgctacaaaacaacaaaagaggtaattacaaaatgtgtacatcacaacatactttttaaagacattatgcattgtgctcacattcccttaaatgttgtttccaaaggtgctcagcctctagcccagctggaatctccgggaagaggcggacagtttggtgaaaaagacacagggaaggagcgggcggcggaaggagggggcggcgaaaggagaaagcagccttccagttaaagatcagccctcaattaaaggtcagcttcgggcaggctggcctcaggcggagtctggttcagagggaggagcagcagcagggtgagactgaggcgttctacatctcattcaggtcaagcagagtctggtccagcatcctttgtgtacagaggtgctcccctttggtgcatttcagtttatcttccaagtcatcaattgtcttttccagcttggctaccgatctctcagcaaactcagcatgggtctccgcctcctttattttatcagtaagaatcttgatctcttcctcatatttgtcttctttttgagagtacttttcttcagcagcactcagacacttcaggttctggtccatcagtctaatctgctcatccatctctcggcaaagggattctgccagctcagctcgttcctctgtgcgttccaagtctccttcaatgatcaccaacttacgagccacctcttcatacttcctatctgcctcttctgcaatgtgcttagcttctctgagttggatttcctggagttccatcttttcttcatcttttaaggcccggttttcaataaccttcttacctctctcactctcatcagcagctttttccgcttcttccagcttttgcagggcagtagccaggtgctcctgagcacggtccagctcctcttcaaccagctggatcccacgttcaaggaggccacctcagcctcagcctgttcccgggcccacctttctccctcaacttctcgctggaggcgctcagctcgctcctctgcatcatctgcctgctgctgcagaacctggatcttgcgcttcaccgcctcgatggtggtgatcccagccatggtgcccacccagctactgctagagctccggttcctgcctcctccgatcggcgttgcagcctcctctcacccttacttccgcctcggttcaaaatatcttaagggaaggagttgatattactccccacatcacgggaagtttacatcccctggtgatatggtttgtaatatcccagggtggatagggtgatattactctccatatcgcgaaggagtactcccccctgtgatatggttcataatatccttggggggagagtgtgatattactccccatatcgcgagggccatatactcctttgtgacatggttcgaaatatcccggtgggggagggggtagagggtaatattactccccatacagcgaagagcatacgcccttctgtggcaaggttagtaatacttcagggaaaagagtgcaatattacttttcatattgcagggaacatacactcccctgtgacatggttcgtaatatcccgggggctgagagggtgatatttctccccatatcaccgggggcctacacctgggtgtgatatggctcataatatacagggagggagagggtgatattactccacataccgagtgaggggttacacaccctcgtgacatgttcgaaataccccaaggaggagacaatgatattactttccctgtcgcgggggctacaccctcccagtgatatggttcacaatatcccggggtggagagggtgatattactccctatatcaccggggggtgtacacttccctgggaaatggtttacagtatccccggggggagagggtactattactccccatatcacgttacatatcagggtacacccccacgtgatatggtttgtaacatcccaggaggaagaaaatgatattactccccatatcgcggtggcatacacccctccccgttaaatggttcataatatcttggggtggagagggtgatattactccccatatcacgtggggcatacaccccactatgatatggttcataatatcccggaggggagagggagatattactctccatgtcgcggggggcatatacacccctgtgatatggtttgtgatatcccgggggcggagagggagatattactctccatatcgtggggtcgtacacttttctgtgatatgattcgtaatatccagacggggagagggtgatattacttcccatattgcgggggcgtacacccctctgtgatatggttcataatatcccgaagaaaagagggtgatattactcctcatatcgcggggaacacacaccaccctgtgatatggtttgtaatattcagcgggggagagagtaatattactccctgtatctcggatggcgtacactcccctgtgatatggttcataatatccagaagaaaagagggtgatattactccccatattccagggaatgtacaccaccctttgaatatggttcgtaatatccaggaggggagagggtaatattgctcccaatatcgaaggaggtgttatacggttagtaatatccagagaaggagagggtgacattactccccacatcgtggtgggtgtgcacccacctgtgatatggttcataatattcaggttaagagaggtgatattgctttccatatcgccaagggtgtacactcccgtgaaatacagttcgtaatatccaaaaggggagagggtgatattactcccatatcgtggggggtgtacacccctctgtgatatggttcataatatccagggtggaataaggtggtattactccctgtatctcggggcatgtacatcgcctgtgatatgattcataatatccagaagaagagagggtgatattaatctccatattgctgggggtgtacaaccccctgttgtatggtttgttacactgagttggggagagggttacattactctcaatatcgagtggggcatacacacttatgtgatatggttcataatatcccagggaggagagggtgatattactccccatatcgcgggaggcatacaccccaatgtgatatggtttgtaatatctacatttttttttttgagacgaagtctcgctcttgtcccccaggctggagtatgatggccggatctcggctcactgcaacctcagcctcccgggttcaagcgattctcctgccttggtcccccaagaagttgggattacaggcgcacaccaccacgcccggctactttttgtatttttagtagagaaggggtttcaccatgttggccaggctggtctagaactcctgacctcagatgatccacctgcctcggcctcccaaagtgctgggattacaggcgtgagccactgcacctggcctggtttgtaatatctatgaagggggaaggtgatattactttccatatcacgggaggcgtacaccacgatgtgatatggtttgtaatatccagggggtatactgggtgatattactccccatatcgcggggagtgtatacccttttgtgatatggttcctaatattaagctgaggagaaggtaatattactccccatatcgcaggggtttttatatggttcataatattcaggaagagagagggtgacattactctccatatcacggggtgtgtactcccccatgtgatatggtttgtaatatccagggaaggagaggttaatattactccccatatcgcagggggtgtacacctctctgtggtttgtaatatccaaagggaagaggatgatattatcttcaatatcttggggggatacagtccccagtgatattgttcataatatccagagggggaggggatgatattactcccaatattgcaggtggtgtacaaccccctgtgatattctttataatatagagggggatgatgatattactcccaatatagtaaacaacctgtgtgtacaccccctgtgatattgtttataatatccaagggtggaaaggatgatattactcctcatatcgcagggggtgtatacccctctgtgacattgttcctaatattcaggggaggagaagatgatactactcctcatatcacaggggatgtacacccccctgtgatacttttggtaatatccaggggaggagaaaattatattattccccatgtcacagagggtgtacaccccgctgtgatagtgttcataatatccaggtgaaaagaggatgatattactccgaatatctcaggaagtgtacacccttctgtgatattgttcataatatccaaaggtggagaggaggatactactccccatatcgcagtgggtgtacacccccctgtgatatggttcataatatccaatgtaggagaggatgatattactttccatatcgcggagagtgtacatccccctgttatattgtttgtaatattcagggagaaagaggatactactactccccatatcacacggggtgtatattcccctgtgatatggttcctgatatccaagagatattataatcctctcttggattatgctacctctcatatcgcatggggtgtacacacactttgtgatatcgtttgtcatatccaaggagggagaggattatattaatcccaagatcacggggggtgtacaccctcctgtgatattgtttgtaatattaaggggggagaggataatattactcccaatataattaacaccctgtgtgtactcctccttgtaatattgttcataatatccaatgggggagacgatgatattactttcaatatcgcagaggatgtacatccctttgtaacaatgtttgtaatataaaaggcaagagaggatgatactacttccaaaattgcaggacatgtacaccccccggtgatattgttcctaatatccagtggggaagaggatgatagtagtcccaatatcgcaaagggtgtacacaccccctgggatattgttcctaatataaaaggaggagaggatgctattattcccaatatcacagaaggtgtaaaatcccctgtgatattgttcgtaatattcaggaggggagaggattatattactcccaatatcacagggtgtgtacacagggaggggcaagggccagaagcgggcgggaatccccatgtttgggcggacccagtttctaatggccagcatttgccaatcaaagcttaccagagaactctaaaagccagggctttcctgctagacaagactcatttctggaactgctttaaaaagaaacaaaacttcccaaggaccccttttcctctctgtctgcctaaaataatgttttaaaaactcctaaagcagctgaattcagcccccttcctgggggaatgtatagacggaactcccacctttcccggcatcccaaggccagagtatgtgaaactcctgggtctctatgtgtgtctgagcggctgctctgccaacactccacacagccctgtgtcctggacccaaggcccttatgacctgagctcaagaggggatctcctgatccatgggttgcaaagatccatgggagaagcatggtttctggggcggggtcacacgctcagtcactgtttccctcggatgccggagatggttcctttggctctctgccaatacagggtgaatcatcatccatccctcttttctttgttctcccgggtcaagttgtttgcctagtcagtcccaatgtgagaacctgaatatttcagttgacgcgctgacttcaaaatccccgggcttcgggaggcggagcttgcagtgagccgagatcccgccactgcactccagcctgggcgacagagcgagactccgtctcaaaaaaaaaaaaaaaaaaaaaaaaaaaaaagtccccgggcttttcttttcactcagtggaaggcagctgcttctaattggccatcttggcccgcccccaccacgtgaccttctgtaaaatgcctccactctccaggaacgctctcattatataactttgcctgaaaccaacagcacgctcattgcacatatcatgggctcatttatttcacttataaagaacctggccaaggaagagatagtgcctaaagtggccagtattctgaccgatatgttagaaaaatggtgtgccgaccaattcatgacatgtgtcccaaaactagcaacggaaattgtattcgccgtgttgaggtctctaatccagatgatgctcatctatgtactggaaaaggcagagtcctttcctgacaagctgctgaaactcttcagaaacatctcatatttcctgaagaagatgatgtctggacaagcagcacaggtcgttcagatttaactttctattcatatatccagcacgatattcgcacaattgtcacgaaaccttaccagttgatgagtcctgcacatttcctttaatttcaggaggaagagggtaatccggatgagttttctgacctactctgctgctgtgattaaacaaccaccaggaaattttgacgacactgttctcctgagctcctccctttcctccgggaacaaaacaattgaatttacaaaaataaagtgttatttgactggagtgaggtctcatgtctgcttatgcggtggctcgctgctcagaacagggtgagtctctgggttgtgtgctgaggaggggaggctctcaatctggagaaaacccactgcaggggacacctccatggggtctgagggactgaggatgaggagccggactgggtctagggaaggaggaggtttcagagggtgaaattctggcactaaagcctgggggtgtttgggaacttcctccttccgaagaagtttcagggagggataaagacaaaccctgggctccttgaggggcccttactaatttgagaggactctatcgggaaggagagtgacaatggcctccttgaggactgaggcccctgaataaatgaggcccagatacagtccatgggggatgagaccttcaagggtcacattttggttgggacagaggaaaagtgcagctctgcagccgcagaggaaaacccggcagtgtgaaagcgaccttggaggggccctgtgcgctctgaatgcgtctgagcccccatcccctgtccccgcctctctttctggattcttccagctcggctgtctccgccatcttctgagcgctccaccctgacttattcaagtttcccttctgccttccaagtactccaaaatctttcagatctgtgtccctacccctgtttttagcatgtgttggggctccaggtccctgaaggtttctggcctgaaatccacctccccagcggagtggactgcgttctagagactccacactccgcgaggttcccaggcccctgagggacaaccgagtggcctgcgcacttcagggctccacactcggcaaggtctttcaagcccttggggtccccttcttagttttttccacctttctgggctgcagtcactccataaatgctgggatctgatccccacccccactctcgtttcctcaattctgcgggctacacgctctggcaaggtcctccgggccctggatcccctccctctccctatgcccacgctcctagtcagcccttctggggtccactattttcaggaactaaccgttctcatggagccttgctaaccggaaagctgtgtggaagaaaggctttgaggatagaggtggagatttggctcttccatagtgccactcacccaccccaccatgctgccactgccagacccggacccctgtttcagaacaagtgaccagattcgctcctggacagccctggacactggccttttctctgaaaactactcaccctttctctagtccccacttcatgccagcctcataccctcttccttcccccacgctggcttccgggatcctcctctgctcagacaacctcttctgtgtcccacccccgtttttagaatgctttggggcaccaggttgggggaaggtttctggcctgatatccatctctttccaaactcccttcttcccttgaaaggcttcttgccttcagccccacttctggctccgaggtttcaggacaccctcctcttcatcctcattcttttgaccaccagctttttaggaattcgaacgtccctctcatcttcgtgaatcctgtccaggcatttgttgaccccttcatctgatacccctgacctcacattgccaaaagtctacccctacccagtacactggaattagacaaaatcccaggagttttacctcaactctgagtgtgcccacaggagctctccctgaagccacgtccttttaagcagggtctagggttcctcccttgtcttaatgaactctttgtcacacggaggacgttatggagcccttatgatctttcactgcctttctgcccagcgttttgtctttccatggacatttataatattttccatggacattttgttctctcaatgtccacccctaatttccaacatcccaaagattctcatgtgtttcctgaaagccatttacaggaatggctgtgcccagacccccttccccaggatcctccttcacacctggtaggtgcctctcctagagagatttgcactcagttgtcgtgcagtcacatggcccagatggttgttaatcacccccttcctggcaacagctagcagccagggaatcactggcacagaaacctcagggtgaccaagatgaggccacctctgtgctgaaggctgtgctccagagcctgcttgggatcaggcttaagcaggtcttcagccagacctgatgttacctggtttccttgagctgccctgcctgagctatcgggagcactccctcaatgcacatcttgattccctatctcatgctctgcttctagaaaccatgagctatcaattgctactggcaatggtcctgggaagtcaaccctaagtatggattctggggttggatgactccccacaggacttcagtgagcaacaatcactgctggcagttggaggacagagtcgctagggcatgtgaccactgtgaaaccaccgatgtttcacctggggtaattttggatgaactacggtagaagcactgaaggtacattgcttttggtttggaagattgtaggtaaataatagcgatatgaatgtggaattggatggctgcaaacgagtgccattgatgcattgaaagaggaaaagtcaggctgtcacctgtcactcagcaatttaaagtgtgagagttgggactagatgtggtggctcacatctataatccagagattcgggggaagcttgaagaggtaggatcttttgagtccaggagttccagaccagcctggacaccagagcaagacctcatctctacaacaaaattttcttaaaaattagatgggcttggtggcacgcacctgtacttgtagatctagctaatggggagcatgagataaaaaaatcacctgagtcagggacttaggggttacaatgaggtatgattgtgccagtgcacacactcccacctggccaacagagtgagattctgcttccaaaaaaataagaaataaatcaggtttgagagttggaaagcatcatcttctcctagagccaaaggacatgtacaactgagacccaggaacaaagcttcatcacaaagagaccatcatcagtggagccgggagatgcattccccctcaccctgccttgaggaggcagtggagtcatctgtctgggatcctttctgacccagccctatttgtttgtctctttggcttctttggatttgtatattttagctgttataacactgtaaaacaaacagagtgatttttttgagttgtgtgaatgatgctagctccatagtcaccctgagagtgatgggaacttttgaatttgtggcaagttggagggtagtgtaagtgacctgagattgccaaattggggctagcactggatgtgaggttaggctagtggaaaaatatgcccagaaccagaggagtgtgggctcactgcaggtggttaggctcagatccaaattgtacagatggatagctttggggtaaagaataacatagttgagaagtgcatgtgttagtctgttcatgcactgctataaagaattacctgagactgggtaattatttataaaactcaggtttaattgggtcatggttccacaggctgtacaaaaagtatgatgctggccatcagctcaacttctggggaggccccagaatagttagagtcatggcaaaaagtacaagggaagcaggctcatcttccacggccagagctggagcaagtggtaggagaggtgatacacactttcaaacaagtaggtcttttgagaactccatcaccggacagcacctatgggatggtgctaaattattcatgaaatatccgcctccataatccactcaactgtcaccagcgcagccagccccacctccaacagtggggattacaattccatatgaggtgtgggtggggacacagctccaacctcaatcagtgggcatcctggattgggtctactatagaaggagaaccaggagctgactatgatcttgaaccctacccatgatggccgggcggggtgactcatgcctgtaaccccagcactttgggaggctgaggtgggtggatcgcctgaagtcaggagttagagaccagcctggccaacatggtgaaaacctgtctctactaaaaatacaaaaaattagaccggcgttgtgctggatgcctgtaatcacaccactacgctccagcatgggaaaaaataccaaaacttcgtctcaaaaaaaaaaaaaaaaaaaaaaaaaaaaagactgcccatgaccactgcaccagtgagagggacaccagcatcactgagatgcaagggctggacattcttcataggtcagagctcaaagcaggggacactgatacagagatgggctccatccatagcaccaaagtggtgagaggatgtgggaatggcagaggccagcactttgccatcaatgcaagggggtataaggaggtgacaccagtgccagagtacatcacggggggactgccctacaatatctaggacttacctcttagagcgtgtttcattagcgacaacagatataaatggcagacaggtgtgtccctgcattaacaggaaatagaaatcatcaagaggaacagaaggcagatgtcagcagccccttagaaagtcatcatccttcatacagttaaaatctgagacagttctcacacgagaaggcctaactcaaaaagaggctgggttctcatgaggcaggtttatgcaaaaccaaggaaggtgtacaagtttggaattctccagtttcccttggaaaagacctacagtcatttgcttaggtaactgagcactgaacaaaggtgagtattgttgtcttttagaagctcttggccaagaaggccttgttggcataaaacccatggtttggaaacatcaccatgacccctgttagagtaatggcctaagggtgggggtcaggaaattgatgtattccttgccaacttctgcctctaagtgagtgaactctgtttgtgaacctctctcctctgtggttatgttcctaggctctcatgtataatcaggagtcatagacttagaaacaggaaaaatacttacagtgtttttgtggcctgtgagctatgacttataattttaggaaaaaaacaattgcaaatggaaagcctaagtctatcaatgctcatccaagacaacataatcaataaaaaccaatatcaaatctcaaggcaaattatttcctgtatatagatggcagagatgagcaccaccatcaaaaactcaaggaccagtgctgtgggtccagtcatctgtttcatggaattcaccagtctggtatcttcaaaatccagaaggatgatggcagatggcaggaaagtaatgcaaacgtcatcaggtgtgaccccactgtagcagctgtgatggatgttttctctcaccatagcaataaataacacaacctcggtcacactgtatgcattgttggtctgcaaaatccatgttttgcaaaactcttcaggaaggtggatctgtaatattggcattgacatgagaacaacagcagtatttattcacaatctcaagctctctgtcttcccgtctctctcattagccatccaagtagtcctgaggaaccaagcccatcagaacattctgcaacataatacacagctccattctccattcaaattttgttgttgttgttgttgttgatgagacaacatcttactccatcagccaggctgacgtacagtggggctatctgggctgactgtagtcttgagcttccaggctcaaggcatcctctcacctcagcctcctaagtggcttgaactacagacacacagcgacatgctgggctagtttttgtatattttgtagagacgtgctctcaccatgttattcaggctggactcaaactcctgagcgtaagtgatccaagcaccttggcctcaaagtgctgagattacaagcctgagccactgcacccagcccaatctccattctactgataacaatgtcattaccaggtctgatggacaggaaatggtaaggtttctgaaaacctaaggatcacacagcgagttccaaaggctgaaagtgcatacctgtcgacactgataccaatgacatccaatggtgagaatgacattccttgtagtcctagctctgctcataacaaatctatactgaagtgtaagagtttgatggtcatggggattttccatgtctctgcctttcagcgatgtgccatatctgtgaagtgttcagaaatgcaacagcctgaggcatgctgggcatatcctctaataaaaaggaaaatgccattttatggtcctgtatttctacaagttggaacacatgggcctgtgatccagatgggggaaatgggaatattcccactcattcaccttcatccacgaagcccatttgaaagctttgggcttcccatccttgtagattttagtgttgtgggctgggtgcagtggctttcacctgtactgccaacactttgggaggcctagacaggtgaatccactgaggccaaaagttcgagaccagcctggccaagatggtgaaaccccgtccctactaaaaatacaaaaattagcaaggtattggggccagcacctgtaatcccagctgctcgggaggctgaggctggagaatcgcttgaacccaaaaggcagagactgcagtgacccgatcctgcctttgcactccacctgggcaagcagaacaaaacttctgtcttgaaaaaaaaaacaaaaaacgaacaaaaaagatgttagagttctgggtttagaggtctataccccagaaagagaatggtttcaacaagggacaaagaagttgctttaaacgttgacttgccatttcttttcagtgtgtttgttctcttgcgtcaagagaccaccagaaaagtggtgcaattactctcctgtcaagaatcattgactatcatctgcaagagggtcagatcctggtatataattagggcagaaatacttagtctgagaagggtatgacatccagaggccctattaatgatgtccttttctccatgcctgactctgaccccatgtgctggactgcccctgtgtggatggcctcatggcctgctcggactctgaggtcccaccccaagtggcacctccatggagggctctactcttgtatgggctctgacactcacactgagacactctcccatggacacctcttcacccacttggggtctgaaactgggctactccatccctccctaacctggaacagagagctttcactgctattacacaagtcatagaggctaactcctcatttttccaagctaattattgaaacattagtcctgggttgataagacaagataagttaacttttcataaatttgcttatcaagttttgaataaattcaaataaattcaccttccccacacaccttagttgtcgacatcacacgcgcacccatactcacagggtgagcacgaaggcttcactgtcagtggagaaagtggcaaaacccttctgtgcctcatcctggtctagacctggccctcatcctttcccactcttcccctcactcccttggattcatccacactggcctcctgcctgctgctccacctccctgcgaagctcacccctgcctcagggcctttgcacgtgcagtggcttcaagccatatcctcttcacccagatctcccagatctcctgaatgatcttcttttatcattcaggtctcagcttgcatgtaatcttctcagtgaggattacccaaaccacatagttcattcattcattcaaatattcattcaatggcatattgacaaagcagctacttcatgccaggccttgggccaggtgttatggatatggcaacaaacaaaacaagagttttctgctctcaaatttttacccacttaaaggagatatcatacatcatctgtaaataaatacatcatctgtaaataatgatgtaaataaatacatcatctgtaaatctgtaaataatgatgtaaataaatacatcatctgtaaataaataaagtataataaaagaaaatagtaggtttttttggttggaggtgaccgtgaagtttgcaaataccatcttacaacacattattttattttatttcatttcatttttaattttattattattatactttaagttttagggtacatgtgcacaacgtgcagatttgttacatatgtatacatgtgtgaagttggtgtgctgcacccattaactcgtcatttagcattaggtatatctcctaatgctatccttcccccctcccccaccccacaacagtccccggtgtgtgatgttccccttcctgtgtccatgtgttctcattgttcagttcccccctatgagtgagaacatgcggtatttggttttttgtccttgtgatagtttgctgagaatgatggtttccagcttcatccatgtccctacaaaggacacgaactcatcattttttatggctgcatagtattccatggtgtatatgtgccacattttcttcatccagtctatcattgttggatatttgggttggttccaagtctttgctattgtgaagagtgccgcaataaacatacgtgtgcgtgtgtctttatagcagcatgatttataatcctttgggtatatacccagtaatgggatggctgggtcaaatggtatttctagctctagatcactgaggaatcgccacactgacttccacagtggttgaactagtttacagtcccaccaacagtgtaaaagtgttcctatttctccacatcctctccagcacctgttgtttcctgactttttaatgatcgccattctaactggtgtgagatggtatctcactgtggctttgatttgcatttctctgatggccagtgatgatgagcatttcttcatgtgttttttggctgcataaatgtcttcttttgagaaatgtctgttcatatccttcacccactttttgatggggttgtttgtttttttcttgtaaatttgtttgagttcattgtagattctggatattagccctttgtcagatgagtaggttgtgaaaattttctcccattctgcaggttacctgttcactctgatggtagtttcttttgctgtgcagaagctctttagtttaattagatcccatttgtcaattttggcttttgttgccattgcttttggtgttttagacatgaagtccttgcccgtgcctatgacctgaatggaaatgcctgggttttcttctagggtttttatggtttgaggtctaacatgtaagtctttaatccatcttgaattaatttttgtataaggtgtaaggaagggatccagtttcacctttctacatatggctagcctgttttcccagaaccatttattaaatagggaatcctttccccacttcttgtttttgtcaggtgtgtcaaagatcagatagttgtagatatgtgacattatttctgaggactctgttctgttgcattggtctatatctctgttttggtaccagtaccatgctgttttggttactgtagccttgtagtatagtttgaagtcaggtagcatgatgcctccagctttgctcttttggcttaggattgactttgcaatgcggggtcttttttggttccatgtgaactttaaagtagttttttccaattctgtgaagaaagtcattggtagcttgatggggatggcattgaatctataaattaccttgggcagtatggccattttcacgatattgattcttcctacccatgagcatggaatgttcttccatttgtttgtatcctcttttatttcattgagcagtggttttagttctccttgaagaggtccttcacatcccttgtaagttgggttcctaggtattttattccctttgaagcaattgtgaatgggagttcactcatgatttggctctctgtttgtctgttattggtgtataagaatgcttgtgatttttgtacattgattttgtatcctgagactttgctgaagttgcttatcagcttaaggagattttgggctgagacaatgggttttctagatatacaatcatgtcgtctgcaaacagggacaatttgacttcctcttttcctaattgaataccctttatttccttctcctgcctaattgccctggccagaacttccaacactatgttgaataggagtggtgagagagggcatccctgtcttgtgccagttttcaaagggaatgcttccagtttttgcccattcagtatgatattggctgtgggtttgtcatagatagctcttattattttgagatatgtcccatcaatacctaattattgagagttttcagcatgaagggttgttgaattttgtcaaaggccttttctgcatctattgagataatcatgtggtttttgtctttgggtctgtttatatgctggattacatttattgatttgcatatattgaaccagccttgcatcccagggatgaagcccacttgatcatggtggataagctttttgatgtgctgctggattcggtttgccagtattttactgaggacttttgcatcaatgttcatcaaggatattggtctaaaattctcttttttggttgtgtctctgcctggctttggtatcaggatgatgctggcctcataaaatgagttagggaggattccctctttttctattgattggaatagtttcaggaggaatggtaccagttcctccttgtacctctggtagaattgggctgtgaatccatctggtcctggactgtttttggttggtaagctattgattattgccacaatttcagatcctgttattgctctattcagagattcaacttcttcctggtttagtcttgggaaggtgtatgtgtccaggaatttatccatttcttctagattttctagtttatttgcgtagaggtgtttgtagtattctctgatggtagtttgtatttctgtgggatcagtggtgatatcacctttatcattttttattgcatctatttgattcttctctctttttttctttattagtcttgctaccggtctatcaattttgttgatccttttaaaaaaccagctcctggattcattaattttttgaagggttttttgtgtctctatttccttcagttctgctctgattttagttatttcttgccttctgctagcttttgaatgtgtttgctcttgcttttctagttcttttaattgtgatgttagggtgtcaattttggatctttcctgctttctcttgtgggcatttagtgttataaatttccctctacacactgctttgaatgtgtcccagagattgtggtatgttgtgtcttttttctcgttggtttcaaagaacatctttatttctgccttcattttgttatgtacccagtagtcattcaggagcaggttgttcagtttccatgtagttgagcggttttgagtgagtttcttaatcctgagttctagtttgattgcactgtggtctgagagacagtttgttataatttctgttcttttacatttgctgaggagagctttacttccaagtatgtggtcaattttggaataggtgtggtgtgatgctgaaaaaaatgtatattctgttgatttggggtggagagttctgtagatgtctattaggtccgcttggtgcagagctgagttcaaatcctgggtatccttgttaactttctgtctcattgatctgtctaatgttgacagtggggtgttaaagtctcccattattattgtgtgggagtctaagtctctttgtaggtcactcaggacttgctttatgaatctgggtgctcctgtattgggtgcatatatatttaggatagttagctcttcttgttgaattgatccctttaccattatgtaatggccttttttgtctcttacgatatttgttggtttaaagcctgttttatcagagactaggattgcaacacctgcctttttttgttttccattttcttggtagatcttcctccatccctttattttgagcttatgtgtgtctctgcacgtgagatgggtttcctgaatacagcacactgatgggtcttgactctttatccaatttgccagtctgtgtcttttaattggagcatttagcccatttacatttaaggttaatattgttatgtgtgaatttgatcctgtcgttatgatgttagctggttattttgctcattggttgatgcggtttcttcctagccttgatggtctttacaatttggcatgtttttgcagtggctggtactgactgttcctttccatgtttagcgcttccttcaggagctcttttagggcaggtctggtggtgacaaaatccctcagcatttgcttgtctgtaaaggattttatttctccttcacttatgaagcttagtttggctggatatgaaattctgggttgaaaattcttttctttaagaatgttgaatattggcccccactgtcttctggcttctagagtttctgccaagagatcagccgttagtctgatgggcttccctttgtgggtaacccgacctttctctctggctgcccttaacattttttccttcatttcaactttggtgaatctgacaattatgtgtcttggagttgctcttcttgaggagtatctttgtggcattctctgtatttcctgaatttgaatgttggcctgccttgctaggttgcagaagttctcctgggtaatatcctgaagagtgttttccagcttggttccattctccccatcactttcaggtacactaatcaaacgtagatttaatcttttcacatagttccatatttcttggaggctttgtttgtttctttttactctctttcctctaaacttctcttctcacttcatttcattaatttgatcttcattcacttatatactttcttccacttcatcaaatcggctactgaaggtattgcatgcatcatgtagttctcatgccatggttttcagctctatcaggtcatttaaggtcttctgtacattgttttctctacttagccattcgtctaatcttttttcaaggtttttagcttccttgtgatgggtttgaacatcccctttagctcagagatgtttgttattactgaccttctgaagcctgcttctgtcaacttgtcaaagtcattctccatccagctttgttccattgctggtgaggagctgcgatcctttggaggagaagaggtgctctggtttatagaattttcagcttttctgctctggtttctccccatctttgtggttttatctacctttggtctttgataatggtgacctagagatggggttttggtgtggatgtcctttttgttgatgttgatgctgttcctttctgtttgttagttttccttcgaacagtcaggttcctcagctgcaggtctgttggagtttgccggaggtccactccagaccctgtttgcctgggtatcaccagcggaggctgcagaatagcaaatattgcacaacagcaaatattgctgcctgatccttcctctggaagcttcgtctcaaaggggtgcctggctgtatgaggtgtcagttggcccctactgggaggtgtctcccagttaggctagatgggggttagggacccacttgagaaggcagcctgtccattcacagagctcaaacactatgctaggagagccactgctctcttcagtgctgtcagatggggatgtttaagtctgcagaaatttctgctgccttttattcagctatgccctgcccctacagatggagtctacagaggcaggcaggcctcattgagctgcggtgggctcctcccagttcgagcttccagaccactttgtttacctactgaagcctcagaaatggtgaacacccctcccccacccagtctgccgccttgcagttccatctcagactgctgtgctagcagtgagcgaggctccatgggcgtgggacccactgagccaggcacaggatataatctcctggtgtgccatttgctaagaccattggaaaagcacagtattaaggtgggagtgtcccaattttcccagtacagtctgtcacgggttccctcatctaggaaaggtaaatcccctaaccccttgtgcttcccggtgacgcaatgccccaccctgcttcagctagccctccatgggctgcatccactgtccaaccagcccaatgagatgaacaaggtacctcagttggaaatgcagaaatcacccatcttctgtgtggatcaggctgggagctgcagaccggagttgctcctattcggccatcttggaatggcaatctatgtttgctttttacatttgaaaaaactggtgtcacgtacctaggtattaatcattgtggtatcctcttgccgatttacctctttatcattaactagtgaccctccttgtcttttgttgttacagtctgtgattttagtctattttatctaatatgagaatagctactctggcacttttttggtttccagcttcatgaaatatccttttccatttccctgttttcatttccctttcggtgtctctatagatgaagttgatttctttaaggcaccataagttgggtcttatttctttatccatttgaccatttagagaatttagaacactgtcagtgttattattcataagtaaaaacttaagagtgggtgtagtggtgtacatctgtatttcctgcactttgagagactgaggcgagctgatctcctggggtcaggagtttgagaccggcctggtcaacatgatgaaaccctgtctctactaaaaatacaaaaattagccaagcatgctggcatgtgcctgtaatccaatttacttgggaggctgaggcaggagaagcttgaacctgggagacaaatgttgcagtgagctgagatcacacagagaagtcatctccactctcctcatcagaacctcttgttcacagcatttgtgagcacaaatcaatgatggttattctttcctactaattagggatattttattacacagcaatagcctccagcaaagggaaccatcatacatgattcctacaagttgacagggctggaattatcactgaaaaactaaggtggctatacttgattcccaatgtccaatttttcatgaatagagaaatttatcctttttccccccagccagaaaccaagttttgctcttacgcccaggctggaatcaagtggcacaatctcagctcactgcaacctctgccccccagcttcaagaaattcaccttttgaacaaggagatattaaggatacactatgtgtatgctaccggtggttgcaggagactcagaaaagagagaaacagtcactggcctcgtgcaactgatattctcgggaggagagaaaggcaatcaagaaagaaacatgctgtatttcagacagctgtaagtcctccacaagaaaagaaagcaggtgaggaacataggaaatgtgtcaaccataaggttcccgctaattctataagttggtcagggatatcctccaagaataagcagcatctgagcaatcacctgaagggaggaaggaaggaagactgtgagtggtggcttacacctgtaatcccagcactttgggaggccaaggagggcagattgcctgagctcaggagttcacgaccactcagagcaacctgttgatacccaatctctactaaaaacacacaaaaaaattacccgggtgtggtggcacgcacctgtagtcccagcttccatgcccagctgatttctctctctccatatatatatatatatacacatatattgtttttgcagagatagggtctcactgtgtcacccagtcatcaagcaattctcttatactgttttggaaaagcatgggaattacaggtgtgaaataccctgctggtcctgaaaaatgtgatatttgggattctctgcctggcttgttttacccaaaataatgacctccagttccttccaggttgctgcaaaagacatgattttcactgttttataactgaatagtattcctgtatgtatacataccacattttctttatttattcttctgttgattgacatgtagggtgattccatgtctttgctactgtaaataatgctgcagcaaatatttgtgtgcattttgatctattcctttgagtaggtacccagtactgcaactgcaggactgagtagttgttatattttttgttctttcagaaatctccatagtgtttgccataaaatctgcactaatttacattcccaacaacaatgcataagatttccccttttctccacattctcactaacatttgttatgtttttgtctttttcataatacccattctgactggagtaagatatctcattgtggtggttgttgatatttttgagacggggtctcactctgttgccagactggagtgcagtggtgtgatcgtggcttgctgcaacctccacctcccgggttcaagcaattctcctgcctcagcctcccgagtagctgggactacaggcgcgtgccaacaggcctggctcattttttgtatttttagtaaagacagggtttcaccatgttggccaggatgatcacagtctcttgagctcatcatacacctgcctcagcctcccaaagtgttggaattacagtcatgaggcagcgcacccaacctcaatgtggttttaatgaccatttctctgacgattcatggtgtggagaatttctttgaaataccttttggccatttatatgtgctcttttaaaaactgactcctgtccaggtgcggttgagcatgcctgtaaccccagaacttcgggaggctgaggccaatggatcacttgaggcaaagaggcagaaatcagcctggccaacaaggcaaaaccccatctttactaaaaatacaaaaaatcagccacgggctgtgactcgtgcctgtggtgcaagttactcaggaggttaaggcacaggaattgcttgaacccggtaggcacaggtcacagtgagccaagatcatggcactgcactacagcatgggtaatagagaaagacctgtctcataaaaacaaatgaataaataaataagataaaaaataaaaaagtctctttatgtcctttgccgactttttaatgggattctttggagttttctgttgtagttgagatctttgtttactctcggtattagtcttttgtcaaaggaaaagtttacaaataatttcttccgttctgcagtttgtctgctcactctgttgagaggattatttctttggctgtgcagcagctttttgtttcagtaaagcttttgaatttatataattaaaattttcagtttggtttaaatttgcactggtcgatttttggttttgttgcctgtacttttgaagtcatactcttgaactctttactagacaataaccagaagagttttctctagttttcttctcacatttttattatttcagtacatatatttaagtctataattcatcttcaattgatttttgtagaaatagtgagaaataggagtccaggtttattcttctgcaaatgacaattcaattgttccagcaccaattattgaaaagggtgtgctttcctcaacgtatattcttatcagctttgtcaaagatcagttggctataaatgtgtggctttctttctgggctctctagtctgttacatcaatctgtgtgtctatctgtatactactaccatgctgtattggtgatgatggctttgtaatataatttgaagtcaagaaatgtgatgctcccagctttgtttatttgcttcagaaaggctgagtcaacagctgcagagatgaagctgcccctcctcgcagggctccttcccggaaaaagatcatggctcccactgaccatataaccatggctggaactcctgaaattcccaaagggaggccctacccagtgaggggggatgaatgaaggtcctacttaaggaatctgtctggccacaatcaggcacagcagctgtgctgccttgtgggggaccagaccacctggattccctggagcctgcaggctagaatgtctgagtccatggaaacacagaaatggaggccgccctcacctccccagaaaactgtagtctcaggcagtctccagccgattgccactggttggctgctattccaagccagtgggtcttaacttgagaggtgctgtggaagtggggcccacggaatgaggctgcttggctccctggattcagccccttttctaagggaatgtacagatggaactcccgccttgcccagctttccaagtatataaaactcctgagtctctgtgagtgtctgagcgagtgctctggcaacattcgacacggctctgtgtatctgacccaagacccttatggcatgagctaatgggaggatcttctgatccatgcgtggcaaagatgcatgggagaaacatggtttgtgggtaggggttgtgcattcactactgcttctcttggctgtaggtgaaggtttctttggctctgtgctgatactgggtgcaccatcacccaccccctttgtttcttctcctgggtcaagtcatttgcctaatcagtcccaatgtaggaacctggatacttcagttcaaggtgctgaattcaccgtgcttttcattcaggggaagacagctgcttctcattgggcatcttggcctgcccacttcacgtcactttttgtaaaatccacaccactccaggaatatccattacttaacttcgcctgaaataaacagaaggctcattacacttatcatgggctcacttacttcgcctataatgaaggtgccatggaaatgctagtggatgacgtggtccattttcttagggatgagatagaaaaatggtgtatggctttttaatttaattaaaatttttagtttggtttaaatttacattggtctctttttggttttgttgcctgtacttttgaagtcttactcgtgaactctttactggacaatgaccagaagagttttccctaagtttcttctgatattttgaccatttcagtacatacatttcagtctataattcactttaaattgatttttgtaaacatggtaagaaataggagttcagatttattcttccgcatatgataatgcaactgtcccagtaccaattattgaaaagggtgtgctttccctagtgtatattcttgtcagctttgtcaaagatcagttgcctatgaatgtgtggctttcattttggattctctcgtctgttacatcaatctgtgtgtccacatttatacctgtaccatgctgtattggtgactatggctgtgtaatatattttagagttaggaaatgtgatgctcccagctttgttcatttgcttcagctgaaaaggttgagtccacaattacaaagatggcagccgcccatccccggaggacctccaacccagaaagagatcaggcttcccaccaaccctataaccctggctggagttcctgaaattccaacagggaggaccttcccagtgaggagggatgaatcaaggtcaaatttaaagaaacagtctggccactatcaggcacagcagcagtgctgccttgtgggggacccctcctgctccagaccagctgccctccctggagcccgaaggctagattgtctgagtctacggaaacagagacggtggccgccccaaccacccagaactcggtagtctcaggcacttggcttgctatcttgccactgcttggctggtattccaagcccgtgggacttgagaagtgctgtgatgatggggaccacaggatgaggctgtctggctccctgtgatatggctgtgatgagtggaggaacaccagggctcatgtctcacacagaattggagaaaatgacacaaacacatgtacagtggttttatggcgtgcagtttaataggcaagaacgaaggaagagctccccatactgagacagagggaggggggctccaaagccaaaagaggaaacccggagtgctgtggataccaatgagttatatgaagaaactggagggggcggtgtctgatttgcatagggttcaggcgattggttcgaccaggcatgtcatttatgtggcccacggaaaaactggccctcccacctagcctttgaatatgcacgtgccggacaccctgatttcctacactcatggggatatatgggggtggccatatcgccaggcacaggtggggacaagggccagaagagggcgggaatcgctatgtttgggtggacccagtttctaatggccggcatctgcagatcaaggttaccggagaactctaaaagccggggctttcctgctagacaagactcatttctggagctgctttaaaaagaaacaaaacttcccaaggaccccttttcctccctgtctgcccaaaataatttcttaacaactcgtataacacctgaattcagcccccttactgggggaatgtaccaacggaactcccacctttcctggtttctcaaggctagattgtgtaaacctcctgggtctcggtctgtgtctgagcagctgctctgccaacactccacacagccctgtgtactaggcccaaggccgccgtgactcagcccatgggaggatctcctgatttcttggttgcaaagatccatgggagaaaaatggtttctggggcggggtcacacactcatggcttctcttggctgtgcaagaaggttcctttggctctgttccaatatagcgtggttcatcacccacccctgttttctttgttctcctgagtcaagttgtttgcctagtcagtcccaatgtgagaacctgaatatttcagttcacgtgcttatcgtgaaattcactgagactttaattcagtggaaggcagcctcttctaattggccatcttggcccgccccctccacgtcacctcccataaaatggccacgctctccagggacgatgccattatatatctttacgtgaaaccgacagaacacttattacactttttgtgagctcatttacttcacttataatgaacatggccatggaaatgctagtggagaaagtggtcgattttctgatggatgtgataaaaaaatggtttgccgaccaattaatgacatatgtctcaaaactagtaacgagacccttaatcgctgggttgaagtttctaatcaagaagatgctcatctatgtattcaacaaagcagcttcccttgcttctgaaatgcttccaaacaacatctcatatttcctgaagaagataatgcctggacaagcagcacaagtcattcaggtttactttcagctcataaatccagcaggatattcgcacaattgttgggaaaccttatcagttcatgagtcgtgcatgtttcctttaatttcaggaggaagagggtaatctggaagagtttcctgacctactctgctgctgtgattaaacaaccaccaggaaattttgatgacactgttctcctgagctcctccctttcctcggggaagaaaagcattgaaactacaaaaataaagtgttatttggctggagtgaggtctcatgtctgcttatgcggtggctcgctgctcagaacagggtgagtctctgagttgtacgctgaggaggggaggctgtcaatctagaaaaaacccattgcatgggacacctccatggggtctggggggctgaggatgaggagctggactggatctagggaaggaggaggtttcagagggtgaaattctggcagtaaatcctgggggtgtttgaaaacttcctccctcagaaggagaagactcagggaggaataaggacaaaccatgggtcccttgaggggcatttactaacttaagaggactttatcgggaagcagagtgacaatggcctccttgaggactgaggcccctggataaatgaggcccagatccagatccagtccatgggagatgagaccttcaagggacatatttttgttgggacagaggaaaagtgcagctctgcagctgcagaggaagccttggcagtgtgaaagcgaccttggagggggccctgtgcgttctgaatgcttctgaggtccatcccctgtccccgcctctttttctggattttttgggctccatggtctccgccatcttctgagcgctccacgctgccaccttcagttttctcttctgggctccaaatactccaaaatctttcatatctgtgcccctacccctgtttttagcatgtgttgggactccaggtccctgaaggtttctggcctgaaatccacctccccagcggtgtggattctgctctagagaccccgcacttggcaaggttcccaggcccctgggggacaaccgagtggtatgtgcacttcagggctccacactcggcaaggtctttcaagcccttggggttccctcctcagttttcttcacatgtctgggatgtagtcactctataaatgccgggatgtgatccccaccccagtgattttttttagttccatgagtgttgctatctgaatagtcatcctgagagtgatgggaccttttgaatttgcagcaagttttagattagtgtgagtggcctgagatcgcaaaactggggctagcattggatgtgaggttaggctggtggaaaaatttgcccagaacctgaggagtgtgggctcactgcaggtggttaggatcagcacagaattgcaaggatgtatagctttggggtaaagaataacatggttcagaagtacatgtattagtcttttcatgcattgctataaagaattacctgagactgggtaattaattataaaaactcaggtttaattggctcatggttccacaggctgtacaaaaaggatgatgctggccatcagctcaacttctggggaggcgtcagaaaacttagagtcatggcaaaaagcacaagggaatcaggctcatcctccatggccagagctggagctagtggtaggagaggtgctgcacacttttgaacaatcagatctttttagaactctatcaccagacagcacctagaggatggtgctaaattattcatgaaatatccacccatatgatccactcaattctcaccggcccaaccaggaccacctccaccattggggattacaattacacatgagatgtgggtggggacacagatccaaactcgatcagtgggcatcttggactgggtctactatagaagaagaaccaggagctgactatcatccttaagactgcccatgatggccaggcagggtggctcatgcctgtaatcccagcactttgggaagccaaggtgggtgaatcccctgaggtcaggagtttgagaccagcctcgccaacatggtgaaaccctgcctctactaaaaacacaaaaaattagatgggtgttgtgccagacgcctgtaatcacagctactccagaggctgaggcatgagaattgcttgaacctgggaggcggaggtggcggtgagccccaatcgcactgctacactccagcatgggcaacaataccaaaacatcgtctcaaaaaaaaaaaaaaaaaaaaaaaaggctgcccatgaccactgccccagtgagagggacaccagcatggctaagatcaagtgctggacattcttcatgggtcagacattaaagcaggccacactgttacagagatgggctccattcatagcaacaaagtggtgagaagatgtgggaatggcagaggccagcactttgccatcaatgcaaggtgggcataaggagctggcaccagtgccagagtgcatcaggggaggactgctttgcaatatctagcacttacctcttagagtatgtttcattagggacaacagatataaatggcagacaagtgagtcccttcagtaacaggaaatagaaatcatcaagaggaacagaaacagatgtcagcagccctcatataaagtcatcatccttcatccagttaaaacctgagacagttctcacataagaaggtctaattcaaaaagagactgggttctcatgaggcaggttcatgcaaaaccaagggaagtatacaactttgggattctccagcttcccttggaaaagacctacaatcatttgcttaggtaactgagcactgaacaaaggtgagtattgttatctttcagaagctgttggccatgaaggtcttgctggcataaaacccatggttggaaacatcaccatgacccctgttagagtaatggcctaagggcaagggtcaggaaattgatgtattccttgccaacttctgcgagacgagtgttggtccactcatctctttcacggaattcaccagtctggtatcttcaaaatccagaaggatgatggcagatggcaggaaactaatgcaaacaccatcagttgtacctccactgtagcagcagtaatggatgttatctcttcattgtaatatccagggagggagaagatgacattattctcaatattctaaacaccctgtgtgtacagcctctgtgatattttttgtaatatccgtgtgggagagaattatattactcctaatatctcaggggttgtgccccctctgtgacaatgttcctaacacccaggaggggataggatgatatcacttttagcatcacagggggtgtacaccccactgtaatattgttcataatatccgggggggagagaatgatattactcccaatatcgcaaagactgtacaccaacctgtgatattatttgtaatatccataagaggaagaataatattactcccaatgtcacaggaagtgtacacccttctgtgatattgttcaaaagatccagttagggaggggatgatattactctcaatatcttaaacaccctgtaggtaagccctctgtgatattcctcataatatccagagggagaggatgatattactcccaatattgcatgaagtctacaccccacctgtgatattgttcctaatatccaggatgggagaggatgatattactcccaatgtcgcaggggatgtacaccttccctgtaatattgttcgtaatatctagaaaaggagaggataatattactttcaacatcgcagggggtgtacaccttccttgttatattgttgctaatatccagggaaaaagaagatgacattaccaccactattgcagaaggtgtacacccccccttgatatagttcctaatatccagaaaaggagaggagatattactccaaatattgcaagaggtgtacattcccctgtaatatttttcctaacattcaggaagaaagagagtgatattgcccttaatattgaagggagtgtgccccccccgtgatattgtttctaatatccaagaaatgaaaggatgatattactcccaatatcacaggggctgtacagccccctcccatgatattgttcccaacatcggggggggggtgaaatagtattattcccagtatcacaataggtgtacacacctgtcgtgatattgttcctaatacccatgggggaaaggacgatattattcttaatatctcagagggatgtacaccctccctgtgatattgttcctaatatccggggtgggagaggatgatattacccccaaaatctcaaagggtgtacacccctcttgtgatattgttcctaatatccagggtggagaggataatattattcccaatatccaggaaaggaaacgatgatgttactgtgaatattccagggggtgtcctcccctctgtgatattgttcctaatatccaggttggggagattatgatatttctccaaatatcacaaggggtgtacaccaaccctgtgttattgttcctaatatcgatggggggagaggacgatattactcccaatatcacagggggtgtacaccacctttatgatattgttcctaatatccatgaagaaagaggatgatattactttcaatatcgcaggggatgtacactccccctgtgatattgttagtaatacctaggagaagaaagtgtgatattactcccaatatcgcaggggatgtacacgcttcctgtgatattgttcctaatatttagggggaaaggggatgatattactcccaatatcgaatggtgtgtacacccccccgtgattctttttttttttttttttttttttttgagatggagtcttgctctgccgcccagactggcgtgcaatggcgcaatctcggctcactgcaacatttgcctcccaggttcgcacgattctcctgcctcagccttcggagtagctgggattataggcagctgtcaccataccaggctaatttttgtatttttagtagagttggggtttcaccatgttggtcaggctggtcttgaattcctgacctcaaataatccacccaccttggcctcccaaagtcctgggattacaggcataactttccctgtgatattcttcctaatattcaggaagaaagaggatgatattgctcccaatatcgcagagagtgtgcactcctcctgtgatatggttcttaatattcagaggaggagaggatgatattactttctatattgcagaaggtgtacacctccctcgtgatgtctttcctaatatccagtgggggagaggttattagtctcaaaatcacagaaggtgtaaacccccatttgatattgttcctaatattcaggggtggggagagaaaggtattactcctagtatttcagggcatgaacacccccaccgtgatatcattcctaatatccagaaggggaggcaatgatatttctcctaatatcacaaagggtgtacaccccttctgtgatattgtaaatattctgtgtgtacacccccctgtgttatagtctgtaatatccgggtgggggagagggtgatatttctccccatattgtaggggatgtacacccttctgtgatatggttcgttatatccagggaagaaaaaggtaatattgctgcccatattgtggagagtgtacacccccatgtaatatggttcgtaatatccaggagtggagagggtgatactgctccttacatcgaggaaggtgtacaccttattgttatatgattcgcaatatccaggggaggagagagtgatattgctccccatgtcgcagggggtgtaaaccctccgtgatatgattggtaatatccaggaaaggaaagggtgatatttctccccatatcgcgggggacgtacatcctcctgtgatatggttcgtaatatccaggaggaaagaggaaaatattgctcttcataacccgaggggtgtacaacccctgtgatatggttcgtaatacccagaagtgtacacccctctgtgatatggtttgtaatatccagggggttagagggtgatattgctccccatatcgcagtgggggtacacccccctggattggttcataatattcatggggggagaaatttacatttatcctcatatcagggggggtgtacaccccccgtgatatggttcgtaatatccaggggaagaaagggtgatattgctccttatatcgcggaaggatcaccctcccctgtgatatggttcataatacccagacgggaagagggtgatattgttcttcataaagcgaagggtgtacagccccctgtgatatggttcataatatgcaaaaggggagagggtgatattgctccccatatcacggagggtgtactcccttctttgatatggttcgtaatatccaggggtgtagatggtgatatagctcgccctattggggagggtgttcacccctctgtgatattgttcgtaatgtccagggaaagagaggatgatattactcccaatatcgcagaaggtttacaccactctgtgatattgttcataatatccagggaaggagaagacgatattactcccaatatggcagggggtgtagaactcctgtgatattgtttgtaatatccaggcaaggagaggatattactctcaatatcgcagaaggtttacacccctatgtgatactgttcatgatatccagggaaaaagaggatattactccctatatcacaaagggtgtacacccctttgtgatattttttgtaatatccaggggagagaggataatattactctcaatatcagaaggggtgaaaaccctcctgtgtcattgttcataatatttagggaaggagagagtgatattactccaaatatcacagtgggtgtacacccccctatgatattgttcctaatttccagaaggggagatatgatattattgccaatatcgcagaaggtgtacaccttactctgacattgtttgtaatatccagatggggaaatgatgatattactcctaatatcacagggggtgtacacccccttgttttattgtttgtaatattcaggggaagagacgattatattactcccaatatcgcagggtgtgtacaacactctatgatattgttcataatatccaggggaggagaggaagtgtacacccccccgtgatattgttcgtaatatccagaggtagagaggatgatattactcccaatattgcaggtggtgtacacctttctgtgatattgtcatgatattaagaaggggagaggatgatattactaacaatatcacaaaaactgtacactccctgtgatattgttcataatatccagaagaagggaggatgatattattctgaatctcgcagaagatatacaccaccctgtgatatggttcataatatcctaggggaaagaggatgacataactgtcaatatcgcagggggtgtacaattccctgtgatattgttcacaatattcagagggaaaaaggataatattactttcaatatcgcaggcggtgtacacattactgtgttattgtttataatatccggaatgagagaaaattttctcccaatatcacaggaggtgtacactcccctgtgatattgttcgtaatatccagggaggggagaggatactattactcccaacatctcagggagtgtaggccccccctttgatattgttcctaatattcggaagtggagaagatgatattacttccaaaatcgcagggggtgtacactccctctgtaatattgtttctaatattcatgagtggaaagaaagatattactcccagtattgcaggggacatacaccacactgtgatcttgttcacaatattcgggggggagaggatgatattactcccaatatcaaagtaggtgtacacccccttctgatattgatcgtaatatccagaattaaagatgataacgttactcccaatattgcagggggtgtacatttttgaatactgttcataatattaagagggggaggggatgatatctgtcccaatatcgcaaagtgtgtacacctcctgtgacattgtcccaaatatccagaggaaaaaaggatgttattactcttaatatctcagagagtgtacacctccctgtgatattgtttgtaacatccagaagaaagaggctgatattactcttaatatcgcagggggtgtacacccccgccccgggatattattcgtaatatccagggggaagtggaatgttcagaatgggagaggatgatattacttgcaatatcatagtgggtgtacaccccactgtgatattgtttgtaatatccgggaaaggagaaaatgacattcctccccatatggcaggggctgtacaccacctatcatattgttcaaaatatccagaaggggagaggatatgtctccaagtatcacagggggtgtacaccccgctgtaatattcttcctaatatccagggtgtgagaggataatagtactcccaatatcccagggcatgtacaccccccttgtgatgttgttcctaaaattcatggggagaaagaatattactcccaatatcacagggggtgtacatacactctgtaatattgttgccaatatgcagcaggagagaggatgatattactcccaatatcacaggggctgtacaccccgctgggatattgtttctaatatcaagggggaaaaaggatgatattactcccaatgtcgcagggtgtgtacttcctctttgtgacattgttcctaatatccaggagagaagagggtgacattccttccaaaactgaaaggggtgtacacaccctttgagatattgtctttaatatccagaacgaaacaggatgatataactcctaatactgcaggggggtacaccctctctgtgatactgtttctaatatccaggaggggaaagaaaaatattaatcccaatatcacagggggtgtacattccccctttaatattgttcctaatatccaggaagacacaggatgatactatttccagcagcacagggcatgtacacccctttgtgatattgttcctaatatccaggaaaagagaggatgatattactgtcaatattgcagggcgtatacactggttctgtgatattgtttctaatatccgggggtggagaaaatgatattactcccaatattccagcgggtgtacacccgttctatgatattgttcctaatatctgggggagagagaatgatattattgtcaatatcacaggggatgtacagattccctgtgatattgtttctaatattcacagggggagaagggtataatactcccgatatcgcagggggtgtacactccccctgtgaagttgttcctaatatccagggattgagagaatgatattactcccaatatcacaggcggtgtaaaccccctgtgtgatattgttcctaacatccagaggaaaagatgatgatattattttcaatatcacagggggtgtacgcatccctgtgatattgtttctaatatccaggggaggagaggatgatattattgttaatatcgcagggggtgtaccccaccctgtgatactgttcctaatatccggggtggaagaggataatattgctcccaatatcgcaaagggtgtacaaccttcctgagatattggtcctaatatccagggagggagaggatgatattactttcaatatcacagggagtttacacaacccctgcgatattgttcctaatatccagcggaagaagagttaggataatactattttcaaaattgctgggtctgtaccccctccccgtgatattgtttctaatatccaggaggggagaaagtaatatgactcccaatatcttagaagatgtacaccctccccataatattatttcttacatccagggggtagaggatgattttgctttcaatatcacagagggagtaaacctttccggtgatattgtttttaatatttaaaaagagagaagataaaattactcccaatacaaaggggatgtattgtgtactcccccctctgatattcttttttaatatccagatggagagaggatgatattactttcaatattgcatgggatgtataaatcccctgtgttattgttctgaatatacaggtggggagagtatgatattactccaaatatcgcagggggttctttccccctgtgatattgttcctaacattcagggagggagaggatgatattactcttaatattgcagggggtgtacccacgcctatgatattgttcctaatatccagagggggagaggatgatctaactcagaatatgacaaggggtgtacacacagcctgtgatatggttcctaatatacaggggagaaggggataatatttctcccaatatcgcagggggtgtacaaccccctgtgatactgttcctaatatacagaaggggacagcatgatattgttcctaatatcgcaggaggtgtacaacgccctgtgatattgttcctaatatccagggcgggagaggatgatattaccctcaatatcgcagggggtgtgcactttccctgttatattgttcctatgatccgggtggggggaaatgacattagtcccaatatcgcaggatgtgtgcaccgctcccccgtgatattgttcctaatatcaagggggagagaggaggatattactcccaatatcgcaagggatgtacatcctccatgcgatattgttcgtaatattcaggaggagagaggatgatattactcttaatatcgcagaaagtggacacccaccctgtgatgttcttcataatatccagggaagcagacgattatatgactttcaatatcgctgggagtgtacatcccttttgggatattgtttctaatatccaggaagggagaggattatattactctcagtattgcaggcagtgtacaccttttttgtgatattgttcctaatattcagaaagggaaaggatgatattactcccaatattgcaggtggtgtatatccccctctgatattgttccttatatcaaggaagagaaagaataatattactcccaatatcaaagacagtgtagacccctcctgtgatattgtatttaatatccatggggaaagaggatgatgttactcccaatatcgcagggggtttacacccacactgtgatattattcctaaaatccagtggaggagaaaataatattgctcccaatattgcagggtgtatacaggccctcccccgttatattgctcctaatatccagcggtggagaggatattactttcaatttgtgtagggagtgtatacccccctgtgatatttttctaatatcaaggatgggaaaggatgacattactcccaatatcgcaggaggtgtacacgccctgtgatattgttcctaatatctagggaaggagaggatgatattactttcaatattgcaggagctgtacaccctctgtggtattgttcttaatatttaggttgggagaaaatgatatgagtccaaatatcgcagaaggcatacacacttccaataacattgttcttaatatccgggggagagggtgatattactcccaaaatctctggggggtgtacacccccttctgatatttttcctaatatccagggaaggaaacgatgatattactataaatattccaaggagtgtacaccttcctaatatcctaatattgttcctaatatccaggggtgggagaggattatattactcccgatatcgcagtgggtgtacacccctcctgtgatattgtttctaatatccaagctaggagaaaatgatatcactctcaataccacagggggtgtacaccttccgcatcatattgttcctaatattcagagggaaagaagatgaagttactttcaatatcggaggggttgtacacaacccctgtgatattgctgctagtatccaggaagaaaggggattatgttactccccttatagcagggggtatacacctcccctgtaatattgttcctaatatcaaggctgggatatacgtggggggaaggatgatattactcccaatatcgcaggggttatacaaccttctgtgatattgctcctagtaaccagggcagaagaagatgatattactcctaatatcgcaggaggtgtacactcccccattatgttgttcccaatatgcagaaaaggagaggatgacattattgccagtatcgcagggtgtgtacaccacccctgtaatattgttccaaatatttagggggagagaggatgatattactcccaacatcgcagggggtgtacacacatcccctgtaatatagttcttaaaatctaggggaaaaggggatcttatttctctaaatattgcagagggtgtacactccccggtgatattgttcctaatagccgggagggagataattaaattactttcaatatctcagagagtgtacatcgcccttgcgatattgttcctaatatccagagcaaaagagaatgatattactcccaatatcttaggagtgtacatttaacctgtaatattgttcctaatatccagggggaagagaatagtattactgccaatatcgtaggggttgtacaccttttctgtgatattgttgcaaatatttagtagagggaaagaatattactcgcaatatcacagggaatgtatacttcccctgtgatattgttctgatatccagaaaaagagagggtaatattactcccaatattgcagggggtgtacaccccccttgtgatattgatcctaatataaaggaaggaagaggatattactcctcatatagaaggggttgtccaccccccttgtgatattattcctaatattcagggaagcagaggatgatattattttcaatatcacagagggtgtgcagtccacctgtgatattgttcttaatattcggggggagaggatgttattatgcctgatatcgcagtagaggtacacccctcaagtgatactgttcctaataaccaggggtgaagaggatgatattactcccaatatcgcaggtggtgtacacccccccatgatggtttctaatatacagagggggagaggaaaatattactcccaaaatcgctggaggtctacaccccccttgtgatattgttcctaatatccaggaaaggaaacgatgatattactgtgaatattccagggggtgtacacccgctttgtaatattgttcctcatatccagggtgtggagaggattatattactcccagtatcgcagggggtgcacgacgcccctgtgatattgtttttcatatccaggaggggagattattatcaatatggcaaggggtgaacaccccctgtgatattgtacttaatagttaggttggcagaaaatgatattagtctcgatatcgcagggggtgtgcactccgcctggtgatattgcttttaatatcaagggggagaaaatggcattactcccaatatcgcagggggtgtacaccgctcatgtgatattgttcctaatatccaggtggagagaacataatattactcccaatatcgcacaaggtgtacacccctcctgtgatatggttcctaatatccatgggaggagatgatgatattactcccaatatcacaggggatgtacaccacccttgtgatattgttcctaatatccagggaagaaaacgatgatattattgtgaatattacagggagtgtacacactccctgtgatattgtttttgatatacagggtgggagaggatgatattactcccaatatcacataaggtgtacaccccccgtgatattgttctaaatatttcggtggggagaaaatgatattagtctccatatcacagggggtgtgtgctcctcaggtgatattgtttttaatatcaagagggggaggagattatattactttcattatcacagggggtgtacacccctcctgtgatattgttccttatatccaggcgaggggaaaataatattactctcaatatcgcaggaggtgtacacaccccatgtgatattgttcctaatattaagggggaaagaagataatattactttcaatatcacagggtttgtactcctttcttgtgatatagtttttagtatccagggggaaagagcatgatattactcccattgtagcaaggggtgtacacacctcctgtgatattgttcctaatatccagaagtggtgaggatgatattactcccaatatcgcagggggtatacaccccacctatgatattatttctaatatccatgggaaaagagtatgatattacacccaatgtcgcagagggtgtgtatttttcctgtgatattgtttctaatattcaggcggggagaagatgatattactctcaatatagcagaaattgtacatccccgctgtgatattcttcataataatcagggaaaaagaggatgatattactaccaatattgcaggggggttacacttcccctatggtagtgttcctaatatccaggaagaaagaggatgatattaatcccattatccaggaagtgtacacccaccctgtcatgttgttcctaatatccagcagggaagaggatgatattacaccccccccccgtgatattctccttaatatccaggaggggagaggctgatattactggatatatagcaggggtgttcataccttctgtgatattgttcctaatatccagaaaaggagaggatgatattacttccaatatcgcagaaggtgtacacctccctgtgatattgatcctgacattcagaaggggagaggatgatattactcaaaataccgcagggcatgtgcattcccttgtgatattgttcctaatacccagaagggaacaggataatattactttcaatatcgcagggagtgcacacccccctttggtatggttcttaatatccagaaggaaagagggtgctattactttccatattgcaaggggtgtacaccccactgtggtatggttcataatatccaggcagggagagggtgctattactccccacagtgcggggcatgtacaccctgctgcggtacggttcctaatatccagggggagagaggatgctatgactccctatatcgcggggtgtgtacacccctgtgtggtatgttttgtattctccaggaacggagagggtgttgttacccctcatatcgctggaaatgtacactcccctgtggtatggttcgtaatatccaggggattgagggtactgttacccccatactccccatatcgtggggggagtgcacctccctgtggtatggttcgaaatatccagggtaagagagggtgctattattccccattttgcaggaggcgtacacccccctatggtatggttcgtaatatccggggtgaggggatgctatcaaaagaagagagaaagagaccccccatattgttctatattattttatactcagtacctgttttaagaagaaacaaggaagtgaaaccaaaagcaggcagcccggcgccaggcaccagacccaaaaccagacccgaaaccaggcctgggcctgcctgaccttagcctgatagttaaaattcaacccatgacctagcaaccaatgttatccatagattccagacattgtatggaaggacattgtgaaatttcttgttctgtgctgtttcactctgattaccggtgcctgcagcccctgtcacatacccactagattgctcaatcaatcatggccctttcatgtaagatctttagtgttgtgagcccttaaaaaggacagaaattgtgcactcaacaagctcggattttgagacgctagtctttcgatgcttccagctgattaaaagccacttccttcactacctcggtgtctgtggggttttgtccgcgactcctcctgctacactatgactccccatatcaaggggggtgtacacccccctgtggttcgtaatatccagcaggggaaaaggtgctattactccccatattgcagggagtgtacacccccttgtagtatggatcgtaaaatcaaggggggagggaaggtgtaattatccccatatctcagggggtgtacacccctttgtggtaaagtttgtaatatccagggatattacagggatattatccccaaattaatacttttataatttcttatgcctgcctttactgcaatctctgaacataaattgtgaagatttcatggacatttatcacttccccaatcaatacttttataatttcctatgcctgtctttactttaatctcttaatctcatcatctttgtgagctgaggatgtatgtcgcctcaggaccctgtgatgattgcattaactccacaaattgtttataaaacatgtgtatttgaacaatatgaaatctgggcaccctgaaaaagaacaggataagagcgatgttcagcgaacaagggagataagcataaggtctgactgcctgtggggctgggcagaacagagtcacatttttcttattgcagaaaatgagtaggagaaatatcactgggaagggaacgcattcctaggggaggcctatggacggccgctctgggggtgtatcccttatgtggttgaagataagggatgaaatacaccctggtcccctgcagtgccctcaggcttgctaggattagaaattccagcctggcgaattctagtcagaccagttctctgctcttgaaccccgtttcctgttaagatgtttatcaatgacaatgcgtgcacagcaggacatggaacctcaatagtaattccattttctccctggccttgtgaccttgctaggcccttctgcccttgtgatcttttattgccatttgaagcatgtgatctctgtgacccactccctattcgtatccccctccccttttgaagtccctaataaaaacttgctggttttgcagatcaggtggtcatcacagaacctgccgatatgtgatgtcaccccggaggctcagctgtaaaatttctctttcgtactctttcactttatttctcagaccaggtgacacttaaggaaaatagaaaagaacctactttgaaatattgggggctagttcccccaatagacattgttcctaatatccagaaaaaaagaagatgatattactcccaatatcacaggggttgtgaaccccacctgtgatatggttcctaatatccaggaagggagagaatgatattactctccatattgcagggggtgtgcacatccctgtgatattgttcctaatatccaggggaggagagggtgatattactcccaatattgcaagggttgtaaactccaccctgtaatattgctcctaatatttaggatttagggggggagaggataatattactcccaatatcgcaggggatgtatatgccctctttgatattgttcctaatatccagggggggagaggataatattactttccatatcacaaagagtgttcacccccctgtgatattgttcctaatatccaaaaaggaagaggatgatatcaatcccaatatcacaggaagtgtacaccccccccttttatattgtttctaatatccaggggaaatgagggtgatatttctctcaatatagcagaatgggtacactccccctgggatattattcctaatatccaggggaaaaaaagaggttgatattcttcccagtatagcagggaatgaatacaccctttgtgatattgcttctaatatcaaggggaaaagaggatgatatgactcccaatatcacaggggatgtaaacctgtggcgttgttgctaatatcaaggagggaagagtatgatattactcctaatgtcgccgaaggtgcacactttccctgtgatattgttcctaatatccaaaagggaagagaatgatattacccccagtattgcagggtgtacaccacccctgtgatattgctcctaatacccaggaaaaaagagaatgctattacccccaatatctaaggggacgtataccttccctgtgatattgtttctaatatccaagtggggagaggatggttttactctcaatattgcagggagtgtacactccccctgtgatactgtttctaatactcgggctgggagaaatagtattactcccaatatcgcagtgatattgtttccctgtgatattgtttctaatatctagtgggggagataattatattactaccccatacacaggggagggtgtacattcccctgtgatattgtttgtaatatccagggaaggagaggatgttactcccaatatcacaggggttgtacaccccttttttgatattgttcctaatatctggggggcagagaattatattactgtcaatatcacagagtgtgtacaccccctctgttatattactctttatattcagggcggtagaggatgatattactccctatatcacagggggtgttcacccctcctgtgatattgtttataatatctaaggggaaagaggatgatatcactctcaatatcaaaggaaatgtacacctttcctgtgatattgtttttattatataggggggcagaggatgatattaagaacaataccacaggggatgtacacccacgtattgatattgtccctaatatgtatggggaaagaggacagtgtaactcccgatatcgcagagtgtgtacacccccttgtgatattgtttctgatatacacggggagaaaagataatatttcttccaaaattgcagggggtgtacaaccccctgtgatattgtttttaatatccagtgggggagagaatattactcccaatattgcagggcgtgtacacaacccctgtgatattgttcctaatatccagagtaggggaggatgacattactttcaatatcgcaaggggtgtacattcccctgtgatattgctcctaatatccatgaggggagaggatgatattattcctaatatggcaggggctgtacaccttccctgtgatattgtttctaacatccagtgggggagaaaatgatattactccctatatcacagaaggtgtacactttccctgtgatattgttcctaatatccagaaggggagaggataatattactcccaatatcgcaggaagcttacaactcccctgtgatattgtttctaatatccagggaggtagggatgatattactcccaatatcgcaggggatgtacactcccccgtgacattgtttctaataaccagggggtgagaggatgatattacgcttaataccgaagggggtgtacacacccttgtgatattgtgcctaatagccagggggaagaaaattatattaattttaatatttatggggaaaaaggatgatattactcccaatatcacaggggctgtacaccgaccttttgatattgtttttaatatccagaagagaagaggataatattgctcccaatatcagaaaaggtgtaaaccccttctgtgatattggtcctaatatccagggagggagagaataatattactaccaatatcacagaaggtgcccacccccaaggtgatattgctcctaatatccaaagataatagggtgatgttactcccaatatcacaggaggtgttcacaccccttgtgatattgtttctaacgtacagggaagggagaggatgatattattcccaatatcacaggaggtgtatactcctctgtgatattgattttaatattcggggggaaaggatgatattactccctatatcgcagagggtgtacaccctctgtaatattgatcctaatatccagggcgggataggatgatattactcccaatatcgcagaaagtctacacaacccccagtaatattgtttttactatccagggggaagaggatgacattactcccaatttcacagagtgtgtacactcaccatttgatattgtttctaatatctagggggagagaatatattactcccaatatcacaggaattgtacaccacctctgtgacattcttgtgaatatccggggaaaaagagaataatattactcccaatattgcagagcgtgtacacccctccatgatatcgatactaatatttttttaaagaggatgatattactcccattgtcacaggatgtgtacaccccccttgtgaaattgttcataatattctggggggagagcataatattactccccatatcgaaaaaggtgtccaccctccttataatatggttcctaatatccaggatattacttaatccaggatacttgtaataccctaaatatacaattgcttgaacctccacctcccaggttcaagcaattcttctgcctcagcctcccgagtagctgggactacaggggcacaccaccacacccagctaatttttttttcttgtatttttagtagagatggggttttgccatattggccaggctggtctcaaactcctgaccttgtgatctgcccacctcagcctcccaaagtgctgggattataggcgtgacccaccgtgccaagccaggaagaggatgctctatagatttccccaataagagatggctttgcagggccattccaaaatatgtcaaagaaatacatttggggataaaatactttgatttcctttagggaatgttatctattatgtgatgctataccagagtcaggttggagtcggttatcttattgcaacaaagagtctgttccgtcactgttgggatctctattttttcctcttatttcttgagacagggtctcactctgtcacccagtctggagtgcagtggtgcgatcttcattcactgaaacctctgcctcctgtgttcaggtgattctcgtgcctcagccccttaagtaactaggattacaggtgtgcgccaccacacccagctaatttttgtattttcagtagagatggtattttgccctgttggccaggctggtcttgaactcctggcctcgtgtcatctgcccacctcgacctcccaaagtgctgggactgcaaatgtgagctattgtgcccagccaggatctctgttttaatgttagtgctggtcactttgcatgaactccaaagggaagaaatataatgaggtgtgtctgaccccctgccttctcatcgtgacctgaattagtttttcaggtttgcaggggatacccttggacaagaaggggctctattcggttggttggggggattagaattttactttttgtttacaatatttctcctgaaagagttaggggctcacaaggaatttccgcgtgagcaacttatgaggaaagccatctgggaagatatgtgtccttgtgtcactgggatattctcgtttaccccaatgatacggcaatgacgcagggttgtgaaattacagctatgtgtttggggaaaaaagaaagcaggattgtgtgactacgtttccaaacttcacttgcccttagccatagtgagttgggggcctggagattctgttttctttcacaatgatatagatacaattaaatgtatagaaagcaaaaaaataaaaaggtgagtaatgaggaacctctgattcctgagtggccatgtagttacccatggcacagagccacagttactgaaggtaaagtttgctggggaatttagaaatgaatccagctcttggaggagtcagtttactggatgcctaagaaaatgcaaacaaaataagaaaaaagggtaatattcaatcccatagttattgttacctgtcatagctaaagtaaaattaaaacagagtgctggcttcaatcttgatgctacactaagcttagatttcagtgaatgtgagtctcagccactagctcagagccacctcccaaagaccaaatcatgtagggacaatagaaagtacttctgagaattgtggttaccaagaacctagtaactgttggggaggagcaaaacaaagtacagaaaccagagggtacaatctgagtgagactgctatcagcttctggaggagcctttactaaaatgaatgatgagagtaactggatgatgagagtaactaatggatgatgagagtaagcaatgtctttggttttcttttttttttttttttttttttagcagacgtctcactcttgtcgcccaggctggagtgtaatggcatgatctcgcctcactgcaacctccacctcctgggttcaagcaattctcctgtctcagcctcccgagtagctgggactacaggcactcatcaccacacctggctaatttttgtatttttagtattttctggtgagggtccaggtttccggaaacaactcagagacatatgttaagatgttatctttagttttcacagggaaccaaatatgttacgactccaatttccttggctattgttttaagttaccattaccttctcgttgatcaagttgctcatttacttctcaagcctagctagatgcctggaatttcccttgaaggaagtcaagattttcctttatctccatactggctgatggtgatcgagtaagcccctaagaggggtccctgctccatctcgagatgctgctagattctacagtgcctaataaacagctctcgcctggccgacaaagagctgcttgctctctggatagcaattccaaagtgaacagacaacatcctgtttggaagactgccactctgttagaagaagcatcaggaaaacctttcttttgagctatttataactaacagcaattgaccaagtatacttttgtgagtgaaactgacctttctccctgtaagaattctccaaaatttggaaactatttgtgagtatttttacttatggcaatataattattggcacaagctcaatcagattcggttttctttcgtaacaggaaccattggagatactcattactctttgaaggcttacagtggaatgaattcaaatacgacttatttgaggaattgaagttgactttatggagctgataagaatcttcttggagaaaaaaagactgggtatattttcaatatgctttccttttaaggtccctcacctgtggaaagtaaagaatgtcactttctgacaggctcaggaacctcaagttatgtagggatctcaagaagatgggggaattcacccagttcatacaggtgaaattgctgttgcaaagattatgaatatgagagaagtccagcatggctgacttcatctcgtgtctggcctcaggctggctgcccttgctcactcttgggcataggccaagctagccatgggaggaatttagtttatagtttaactttgaagcacggatgataatagtctctccctaaaatgaaccccttccttgctcagggactgaaactacctttgtatgacaaatgaaagcccacaagattaagattatgagaggggcctgaattctgctaaaatgcaggtgtagctgactgataacaagtcattgtcccacagcttgcctttctataatctcttgcttctcaggagtcacatggccagaggtcctgagatttccagtcctgtgacccccacccagagatggacttagtgcatgaggaccattttccacacccctatgatttcatcctcaaacaatcagcagcaaccattccctagccccctgccttccaaattatccataaaaatcctagcctctgagttattagggagattgattaataatcccagtcctaccccttgggttgctctgatttaattaaaccttctctactgcaataccacggactcagtaaattggttttgtctgtgcaatgggcaagaagaacatgttgcatggttatacaggtactacaagcacagtctgatggcaaattattggttttgcttcctgcccttgatgtttctaaacatctagtccaaaattacttgtgaaaggtccagcaaagccaattttaaaagaggctatatggccaatcactattctttctacacattattgcaaataatcaggccacggctgggcacggtggctcatgcctgcaatcccagcactttgggaggctgaggcaggatcacctgaaatcaggagttcaagaccagcctaggcaacatgataaaaccctgtctctactaaaaatacaaaattagccaggcatggtggcatgcacctgtaatcccagctacttgggagactgagggaggagaatcacttgaacctgggaggcagagattgcagtgagctgagatcacaccactgcactccagcctgggcaatagagtgagactttgtctcaaataataataataataatcagaccaagtataatgaaattaaaatttattttgcaaataaattggtcctactacaatttatccttcatagaaatgtggaaactgaagataaaaaaaattaggtttcagaagaaaactatactacacctgttattagattctagccctaaacattgtttttgaggtttttattatttacctgcaatttggtctaaattctgaattatttcctgactacaagtatccaaggaataaatgggttttctttttctttatgatagttttagttggcttctaatgcaacaacaatttttattgtaatcctgtgtgcattctattcctactattcaaattattaatgttatagatctttcattgtagtacttctgaattaaccaaaatcacagtattctgaagatgattctacaaagcctgctgtttctacaaaggctgctgatgatttctacaaagcctgctgtagtgttgctgtggcctctgcttaaaaaagtagaaaacacattgatgcagcatgttcaccccaacctccctgcctaaaggctcagggaccatcttggaagaggaaggcgcgtgagattgtaagagccgaattagggggatggagtgtggagaataaggacacttcatcttggatgctcacctgccaaattgacttctgatgaaagccagctccagaaatgtgcctacagttactactttcacctaaaccctgcccttagtcaaatccttctcttcttctaagcaatcaacttcaattccttgtataacccacagtataaaagggcttttataccattctatcctattgcatgtaagccttgggtctgggaggtaacagtgtgggattccaccatctcatctccctgccacccaaacatgcctgctcttctttaagcaatattaaatgtttgtacttcagaaatttgatttgtcagcctcttcttcagactctcagcttctttggcctttgggagtaaatttgcataggcctgctcaaaacaggatgttctgggggtttgggggtgttgttttgttttgttttttgttttgtttagagacagggtctcactctgtcacccaggttggagtgcagtggtgcaatcatggcacactgcagcctcaaactcctaggctcaagcaatccccccaccttggcctcccaaagttctgggattacaagcataagccaccatgcccagccctggacttttctttaaagacatttacacagtgtaggaattactgtgggtgcactgctcaggtccccttctccaggatgctcattcctacctcatagatgattttcctgcagagatttgacctcagctgaagggcagtcacctggtccaggtggttgctattcacctccttcctgagaacagccaacagccagggacacgctagcacagagatataagagcgaccaaggtgaggccccttctgtgctgcggtgcatgctccagagcctccctgggatcagacttaagagggtctccagccagatctggtcttcgctgctttcctcgagctccccagcgcactcctgcaatgcatcttttttttttttttttttttttttgagacggagtttcactcttgttgcccaggctggaatgcaatggcgcaatctcagctcaccacaacctctgcctcgcgggttcaagtgattctccttcctcagcctcccaagtacctgggattacaggcatgcaccaccacgcccagctaattttgtatttttagtagaaacgggtttctccatgttggtcaggctggtttcgaactcctgacctcagttgatcctcctgcctcagccttccaaagtgctgggattacaggtgtgagccactgtgcctggcccaatgcacctcttgaatcacctcctcatgctttgcttttagagaacatgatccccaacatgtgattccagcaaagattctagaaagccaaccgtgacaatcacttctgggtttagatgacccccccccaccacaagatggcagtgagcacctcatcacagaggtgctgatggtctgcagcaccgcgccaggccagaacgtgccttttacagaagaaaataacccagtagctgactaggatggtgaggagggctggtgagcactgcggtagtgagagggacactagcatcactgagatgcaagtgatggtcatttttcataggtcaaagctcaaagcaggggacagttacagggcagggcttcatagcaccagtgtgatgaaagtatctgggagtggctaaggccagcactatgccatgggaagcaaggtgggcctgaggaggaggcagcagcgtcagcctgcaacaagtgggggctgccctgcagagacctaagagtcatgttatagagcacagtgtctgtaaggccaagaagtgtggacagccaagtgtgtcaattactagacatactcaagaggagcaggaagggcagggcatggtggctcatgcctgtaatcccagctacttgggagactgaggaaggagaatcgcttgaacccgggaggtgaaaattgcaatgagccgagatttcgccactgcactccagcctgtgtgatgggagcgggactccatctcaaaacaaaaaaagaaaaaggaaaaagaaaaaaagaaaaacctaggtatacttctcaagcaaataaaaataatcaaaaccaatatcatgcccgggcacaaatttcatatatataacagatttaaatatatgagggtgattatcctctcatatctccatttttttttgtttttccatttttttctttactaaaaaaagttaatgccaatgacacacaatttttttttttttttttttttttgagatggagtctcacttcttcgccctggctggagtgcaatggcgtgatctcgactcactgcaaagtctgcctcctgggttcaagcaattctcctgcctcagcctcccaagtagctgggaccacaggagtgagccaccacacccagctaatttttgtatttttaatagagacggggtttcaccatattggccaggctggtctcaaactcctgatctcaaataatctgcccgcctcggcctcccaagattctgggattataggcgttgagccactgcgccccgcctatgtatgattttttttttaattttattttcataagtttttggggaacaggtggtattttgttacatgagtaatttctttagttgtgatttgtgagattttggttcacccatcaactgagaagtatacactgaacccaatttgtggtcttttatccctcacccccttcccaccctttcccccggagtccctgaagtccattgtatcattcttatgcctttgcatcttcatagcttagctcttgaacccttactttctgtttgagggagaagacatatcatctacaagtagatactgtgtaaacattccattgcatgactatcccataacttatttattatttgtgtttggttatttgctgctatgtaacaaccccactcccaactaaatggtgtgacaattccatgattctgtggatcaaaaattctgaaaagtcaaacccaaggagttttgtctctgctccatgatgctaaagcctccgcaggggtgaggcgaatggctcagggtgactgaaaagctcagggttggaacagctggggatgaggcctctatgtataagatgattcttcactcacaggtctgaaactatggtggggacagccagaaggctcggctcagctgggacagtcacctgagccctacacatgacctctccaacatggtgatcctgaagcagttgggtttcttacacagcatcacacttttcttttttttttttttttttgagatgaaatattgctctatcacccaggctggagtgcagtggcacgatctcagctcactgcagcctccgcctaccaggttcaagcgattctcctgctccagcctcccaagttgctgggattgcaggcgcctgccaccaagcccagctaatttttgtatttttagtagagacggggtttcaccttgttggccaggctagtcttgacctcttgacctcaggcgatccgcctgcctcggcctcccaaagtgctgggattacaggcatgagccaccgcgcccggccaaagctcacacttcttatgattcagccttagatgtcacatcagttcattttccccacacttattagtgttagaagtcacaagcccacccatactcaggggactggcacacagaccccactctcaatggaaggggtgggacaccaccattcctgctgatgggcatttgggtaacttcctgtttgaagctattaagattgggctgctgtggccgggcgcagtggctcacgcctctaatcccagcactttgggaggccgaggcgggcggatcacgaagtcaggagatcgagaccatcctggctaacacggtgaaaccccgtctttactaaaaataccaaaaaaaaaaaaaattagctgggcatggtagcgggcgcctgtagtcccagctactcgggaggctgaggcaggagaacggcgtgaacccgggaggcggagcttgcagtgagccgagattgtgccactgcactccagcctaggcgacagagcaagactccgtctccaaaaaaaaaaaaaaagattgggctgctgtgactattctagtaggtgtctttggtgagcgcctacacgtgtttctctttttctctttagtatatgcccaggaggggaactgctggctcccagataccgtatgttcagggtcacacacacttccacagggttttccaaagcccttgtaccagcacgcactcccagcacctgtgtgactgctccagctgtcccacagtctcatcagttctattgctgatattttcattttagcttaagttatatttaataggaaaattaccgttgcctctgccccccgttcctgcctgtaggagtttctcgtagctgttgctacaggtggccacaaatctgtcacttaaacccacacaaattgatgtccttatggctttggagtcagaagtgtcaactgaaggtactagcagggctgtactgacctggtggcctcagggagcatctgtgctgcttctccaccttctagaggctgctgcatccctcgctccagccccttcctgacaccactcaccctcctacttctgttatcacatcctcaccttctctgtgttcagggctccctctgtctctctcttgcaagcacacttgggattccattgagggccacccacataacccaggagaatttctccacctcaatatccttaacaactgcagagcccttttgccataaaagttaccattcacgggttccagggattgtgacatgggtagctttaggagtgattattcctgcctgtctcccgctcaccagaacttggactttctctctcaacaggagccccctgtgtgggaatagcctgtctcaacgacgccctctataaggacctgcttcctcaaaggacctcatagtcgggtcctgcccctcagtgtccagtctgccttggctggaggggctgcaggggtgtgttggcgccacctggtggagacagggcatcacagcaggtgggagcccagtagaagcacaaccaaaacatgggtaatgtttaaaattttctggctaagcgctgtggctcacgcctgtaattccagcactttgggaggccgaggtgggtggatcacatgaggacgggagtttgagaccagcctggccaacatggtgaaacatcccctctactaaaaaatacagaaaaattagctggacatgtggcgcgctcctgtaatcccagctactcgagaggctgagacacgagaatcgcttcaaccccggaggggttgccgagatcgcgccactgcactccaggctgggcgatagagcgagactctgtctcaaaaaaaaaaaaagaagaggggaggcgaggggaggggaggggaaaagggggaatttgtttggagctgagacatccatcttctcctgacctcagatatttgcactcctggttatgaagccttcacacttggactgaatacaccaccagctttcccgatttccagcgtgcaaatggcagatcgtgagacttctcagcttccataattacatgagccaatttatatatataaattgggtcctccagaaaaacagaataaattatatatataattatacgcataacttaattaaattatacgtataacttagctatatatataatttattctgtttttctgaagaaccctactgacacaaatgttgagcatcttttcatgtgcttattggcttaataacttgtacatcttctttggggaaatgtctattcaagttctttgcccattttgtaactgaactattaatatttgtctttacattgttgagttgtaaaagttccttatatattctagatactagagccttatcagatatatttctgcaactattttctcctaatatataggttgtgtttttattttctttttctttttttttttattgagacagtctcactctgtcacccaggctggagtgcagtggcatgatcttggctcactgcagactcgacctgccaggctcaagcaattctcccacttcagcctcctgagtagctgaggttataggcacttgccatcgcacccagctaatttttgtattttttagtagagccgaggtttcgccatgttgcctaggttggtcttgaactccctgcctcaaagcgatctgtcagcctcagtctccctaagtgctggaagtacaggtgtgagccacagtgcccggccatctattttcaatagtgttttttgatgtacacaggtttggaattttgataatgttcaattcatccatttttttttttttttttttggttctttctactggaccaccactcttgagccctctaatccaacctccacgcggcagccagagggagctctctaaatgtaattactctttccctgctccacctgctcaaaacagtgtcacatttgtgatttaaaacagtatttctcaaacctaatttgcaaacaaagcaggtggaactcttcttgtatgcacagcatctgatttggttggtctggcatgggtctgggagtgagcacacctaccaagcggctgctggggtaacttgcgttttccactgatgatttcagcaatgtttccggtcccacatgctcctccagaaccttgtactcccccatgaaaaggtggagtccatttccccttcctttatttatttttttgagacgaagtttcactcttgttgcccaggctggagcgcaatggcgtgatctcagctcaccgcaacctccgcctcctgggttcaagcaatgcttctacctcagcctcccgagtagctgggattacaggtatgtgccaccacgcccagctaattttgtatttttagtagagacggggtttctccatgtcggccaggctggtctcaaactcccgacctcaggtgatccgcccgcctcagcctcccaaagtgctgggattacaggcgggagccaccgcgcccggctatttccccttcctttgaacctgatcaggacttgacgatggcatcaacatggtgagagtgaccctgcatggcttatgaggctgggttacacaaggcgatgttgcttctgactggctccctctcaggatacatgcccttggaacccatcctctaagctccttgggagcccaacttagcccatgtggagacaagacagggagagaaacagaggcacccccagccctcagccagcatcaaccgccagacaggagagcaaatgcgccaacaatgattccagctgaagcctcagacagcgtggagcagagatgagggatccctgcagattgcagatgcgtgagcaaaatgcatgctgtcactgttttgaaacaacaatgtctgggggctgtttgttatgcagcaatagacagctgtaacaatgctgttactgctgtattccatgaatgactgcactttgagtagcagggggctagatcactagataagccccatggcttctgtgtatgctatttttctacttttatatccttttcattcactttttttttttttttttttgagacagagtctcactctgttgcccaggtgggagtgcagtggtgcaatcttggcggactgcaacctccacttcccgggttcaagcaattattgtgcctcagcctcctgagtagctgcgactatagatgcacccccatgcctggctagtttccgtatttttagtagagacggggttttgccatgttggccaggctgatctcagactcctgacctcaggtgatccacccaccttggcctcccaaagtgctgggattacaggcgtgaaccactgcacccagcctcattcactttctttacttggctcatttttccttgttgcctcaattctcctctaagatcactttcctgacatttcagcctgggcctgttgccttctctgggtcccctccgcctcctgtgcctcccccatctcagccttgatccctcagattatacttcctctgtccccaccctgaccatcttggctgtccctggatagggatgggtatcttctcccactggtctgggagatctggaaggacaggcctggaaaagacttggtcactgctggaaggagctcagttagtgtggtgctgaggacagtacgggtgaggctggccccttcacccaaactcccactctcttccatagatttcacctctgtggcccaggccataggattagggcaactccccttaaacatcgagtccatcctccaagctgtccttttttttttttttttttttttttttgagacagagtctcgctctgttgcccaggctggagtgcagtggcgcgatctcggctcactgcaagctccacctccagggttcactccattctcctgcctcagcctcccgagtagctgggactacaggagcctgccaccacacccggctaattttttgtatttttagttgagacggggtttcaccgtgttagtcaggatggtctcgatctcctgacctcgtgatccgcccgcctcggcctcccaaagtgctgggattacaggcgtgagccatcgcgcccggcctcatgctgttcttgaatagtgagcacctgttacaagtcgccccaccagcctctcacttgtacccccctcatctctttctccccaagagacagaggaccctggcacttgtgaagcatgacccagaccctggggccatggcatccaacatcctcattccccatgacccctactgtctagatgtagctgccaagagacccccagactccccgggcctctgtctagagtgccaagacagagagagaatgccctgccgcttgcatgctttgtggggtgtccttcccccttccctggctgctaggcgtgacttcaacgttctccccaacccccaaacagcagcactgacaccagctgcagacctggctcaggttagctaatgaggaccaggctggggatggagcctgaacccctaaaccccagtcctgtaccccaccctaatcctggggtctccactggacaaaacgaagcagcttggtttttcgttgttattgtttttgagatagagtatctctctgtctcccaggttggagtgcagtggcgtgatctcagctcactgcagcctccgcctcccgggttcaagtgattcttgtgccgcagcctccccagtagctgggattacaggcgcgtgccaccacacccagctaatttttgtatttttagtagagacagggtttcaccatgttggccaggctggtctgaaactcctgacctcaagtgatttcccagcctcggcctcccaaagtggaagcggcttatttttaaggagaaaactcccgtggaaaggaatcagcacctcctctgtcaacatttcacttctctgaaaagactctcacttccaacagaaagtgctttgtaacacaacaatgaggctgggcgaggtggctcatgcctgtaatcccagcactttgggaagctgaggcgagtggatcacgaggtcagaagttcgagaccagcctgaccaatatggtgaaaccccgtctctactaaaaatacaaaaattagttccgtgtggtggcgtgagcctgtaatcccagctactcaggaggctgaggcaggagaatggcttgaacccaggagatggaggttgcaatgagccgagatcacgccactgcactccagcctgggcaacagagtgagactccgtctcaaaaaaaaaaaaaaaagaatgagaacatatggacacagggaggggaacaatacacacaaacaaaatttagaaacaggtgaaaataattttagtaatatttttactaatactgatatgctcaaaatattattatttcaataagtaatctaaaaattattgagatgtcttatgttcttttcatcatactaagcctttaatatttggtgtgtattttacactcacagcacatctcaatttgcagtccccatgtttcaagcactaaataaccatgtgtgtccggtggctaccatactggacagcgttgatctgaaatcgcatctgtatgcatcaccagcatatttgcagagatccccatctcagcagcacacctgaggctcatctgcgaaagcacctgcaacttctctacaacctcccacatcacctccaaacacatcctcatgtcatctgcaaacacacccatagctcacaggccaatgcctaaatatcattgcaggcaccttcagagaaagcacttactaaaggggtatacttgattccacatctgctttgacctgcaaatctcccttctcctttacatacatttgcatctcatttgtatgtcaatctaaatccactggcagagcctcagatcatcatctcaaagtcaggtggatgtggggctgggcaggcctccaggtgttcctcctcctgcttcctctggggctcttgatcctcctcctcttccttgctgctctcctcctcctcctccaatatggtgaccagttcctcccgcagcgcccccatctccagccccaggctgcacagctgtcccagcagctggacatccactcggcgcaggttcccctgccagtaggaaggggacgtcacagggatgccaccccagagagcaaggggtctctccaggacctgggtgagagcaggtcccaactcatgtcctggccacagcgcctgggcagggtcctcactgtgcccatggaccctaactgccttcctgcttctcagagtgtctcttgatctctaactcttctctttgtctctccatttcattgtccctgacttctctctctctgtctcctccctctcttatctatatctgtccctgtttccctttgtctctgtccccatttattttttgtctttccatgcccctgtctctctgtctttatgtgttgccatttctctgcccctgcctttggctctctttctctcgcttgccctctctctgccctccccaactttctcaaattcagtctgtctctccatctctgttcctgctctccgtctctgcttcccacctctgtccctctcttttgggatctccctgtccccacctctgttcccgtccctcactctatgtctgtctctcggtgtctgtacatgcctctcatgtctctgcttctatctctcagattctgtttttcgatctctggccttctctatttttgttcatttccattcattctcatttcctctctttctctttcccttccaaacccctcactcaccagctcctccctgatccacagcagactatcgcaggcacctccagtgtctgcccctgcagtcctgagggtctgaccagggatttccactggggagacctccctcagggcctgggggggtgggcccagccccggaggcaccagtccagcctgattcagctgcctccacagttccatcgtctctgagctatggctgcaaggagcaggaagtagcaaggtccagggtggcctggtcccctggggagctgtgtgcgtggtggagagtaaagggcagagggagtgggatgggggttcctgggaaaggtatcccaaagtccactcttcagagagaatcagctggccttgtgcttttctttttccttctgaagtctaacctcaactctgctcacagggttcaaacatagcctcttgcagaggtctaactccacccttccctgcctgtctcaggcctgacccctcaggggcgctcagtgtctgtagatgcctggcaccctctgtccttccacctgccccccaccaccacttctccagcctctcctcagcctccatttgacctctggcttgcccatagcttggtccttgcttgtcctcttggcacgggtcatcctagggctttcccaccagtgtgcctttgggggcaggaatggctcccaggggcaccaagacagcaatcccttagctggagtgcctgtgtccaggctgctggcctagggccaagcagccaattctgctgaccctggacttgcctatgggtatattatccctgttgagggtgagggcttctgctgtggaaaagtctgggaagcactgcaggcctctctcggccttggacccttccttcagacccaaggtgcatatatatacatatatataatggtagatcacgaggtcaggagatcaagaccatcctggccacatggtgaaaccccgtctctagtaaaacacaaaaaattagccgggcatgctgccgcgtgcctgtagtcccagctactcgggaggctgaggcaggagaatggtgtgaacccaggaggtggaggttgcagtaagccaagatcacgccactgcattccagcctggcgacagagcaagactccatcttaaaataaacaaatgaacaatatatatatatatgtattttgttttttgagacagagtctcgctctgtcatccaggctggactgcagtggtgcaatcttggctcactgcaacctccgcctcccgggttcaagcgattcccctgcctcagcctcctgaacagctggggttacaggtgcacgccaccacacctggcgaatttttgtatgtttagtggagacggggtttcaccatgttagccaggctggtctcaaacccctgacctcaggtgatctgcccacctcggcctcccaaagtgctgggattacaggcgtgagccaacgcgcccagccccaagtcccttttaccatagaaagtaacatagtcacagtgcccagggattcacaggtatggggagagggttcgttattcagctgccacacccaccttcctaaacctgctgcccttccagtttcctcacgtgcacagccacgcccgtctgcttttagtttctcaatctgttggcttaaccttcaaaacaggcccaggatttgagcacttctcaccattccctctgccccatccccattcatctcttgcctagactgctacagcagcctcttttactggtcccctgcatccacccttgccctctaaggcaagggtccccagtccctgggccaaggaccagtaccagcccctcgcctgctaggaactgggccgcacagcaagagatgagcagcgggtaagtgagcattaccgcctgagctccgcctcctgtcacatcagcagtggcattagattctcataggaggcaaaccctattgtgaactgtgcgtgcgggggatctaggttgcctgctccttatgagaatctaatgcctgatgatctcaggtggaacagtttcatcccaaaaccatccccaccccacccccgacccccagtctatggaaaaattgtcctccacgaaaccagtccctggtaacaaaacggttagggaccgctgctctaaggtacattctccacctggcagaaataatctttacaaaatgtaaatccgattttgacactcccttcttcccactgtgaatagaataaaaccctaccaggcctgcaccgtcagcccctgcccacctctcaacccagtctcctatctctgtctgcaagctggttcccacctcaaggcctctctgctctagaggctacctctccctgcagcgcttttcccctagatctttgaatggctctttccttatcattcacttctacttcaatgtcacctcttcagagaggcctttgctgatggccctacacccagtcacttttttttatctgcttctcatcaaaattgccttgctgattcctttgtttcttattcatcctctcccacatccatcctctcccagcccagaatgttgacttcctgagagagggactgggtctgtcctgctcaccatggtaacctcggcatctagaacagtgcctgccatcacgtggtaggtgctcagtaaatattcttggaactaatgaatgaataattctatccacaagacttcacaatggctcttcatgctgcgatctagctttcaactccaaactggtcttgagatctcacctcagtctctaaccttgacatctaacctcttcacccactctcttacctgaccctaatttttaaaaatgacgtggtcagcttttcagccccctcattccctgtttttaggaggtagtgagtggaagctggaagaataagaaagcttggggagactgcaattgcagtcaggaaagaaaggtactctgccgggaagaacaccccatcttctcctagggaaagattgtggagtcctggggtttgttttgtttttcaattttttgttttaagagacagcgtctcgctctgtcacccaggctggagtgcagtggcgcaatcacagctcactgcaacttcgacctccccggctcaagtgatccccccgcctcagcctcgtgagtagctgggaccacaggcgtgcaccaccacgcccggctaacattttattttttgtggatataaggttgccctatttctttgtggagataaaggctcccctatgttgcccaggctggtctcgaactcctggcttcaagcgatgctttcgcctcggcctccacaaagtgctgggttcacaggtgcgtgagcccgacctgtgtctcgttttgaagctcagggagagggcgctgtgagcaatccctaaaccctttaagagtaaaaagtgcgtgcacctttaagaggacggttagaaaacgcggggcgtggccacaggagaataagttcgcgctgaaccaggagcgtgggataagaccggccccttccggttacgaaaccttagcaagatggcggctccctgggcgtccctgcgcctggtcgcccccatgtggaatgggcgtatcaggggcatccatcgcctgggtgcggcagtggccccagagggcaatcagaagaagaaaaggacaatactccagttcctgaccaactatttctacgatgtggaggctctgagggattacttgctccaaagggagatgtacaaggtgcatgagaaaaatcgatcttacacctggctggagaagcaacatggtccatacggcgcaggtgcctttttcatcctgaagcagggaggcgcagtcaagtttcgagacaaggagtggatcaggccagataagtatggccatttctctcaggagttctggaatttctgtgaagtgcctgtcgaagctgtggatgccggtgactgtgacatcaactacgagggcctggataacctccgaacctccgcaggctggacatctcggacctccctgccgtgtccaaccctggcctcactcagatattggtggaggagatgctgcccaattgcgaggttgtgggagtcgactgggctgagggcctgaagtcagggccggaggagcagcctcgggacacagccagccctgtccctgcctagcctttagccctgtccccactcacgtggcttctcagcgggctgcatggaatgtctggtagctcaccacacttctggcttccatttgtcttcactcaacgtcagggtgggggagtggtgctggccaatcacaggagagagcgtgagttcccagtatttattcctggctgcccttggctaaaggtcacagctcctgtcaccctgtcaggcagccctttccatgcccctgttcaggcctggggaggtaaaggctcaggctgttagtagccgcagagagccacactcaccttgtcaggagactcttctcaaactgtccttatgtgagtgcactgccatttcttgcagggaccctgactgacacaggggctactactgacactttacagggatggttctcccccgtgcagggccgctgtgcccactgcaggacatgcagcatccttcgccccactccactcactaaaggccagcgcaccccaggccccatagtattgctggttatggatttattgactttatgttccaaattcagctttttcagttggctgttttttgaaaggggataagctttgtcagtagagggcaccgaacaggcattataggaggaaaggcgcctccttcgtggttcttgttggttgtgcttctgcctctggacgccgcagtgcatgtggcttccccagcacccagctcctgaagcaccaggcggtcagcagctgcccttggcaccctccagccctcagaagttgcgtaggagacacagcgcctccactgaggcacctctctgggaataacgttccccagcaccccaaatggatttccagtcaattcagaagcattttaccagtgaagccctcattattccagttcactgttaaagccagtaattctctatattaaactttccctgttcggtttatactccggagtataaaccgaacaggggtggccaagctgctgtgggccgccgccgtgcagaaccgctggaactcacgcttggggcgacggctacagttggattttgcccctgcaggcaggttcggtgtcgatactggcgttgatagcgctgctgccgtttgacgtggcgaatatgggcttgtttctcggcctgatcgccgtgttgtcgtagttcgcagccacccagga

SEQ ID NO: 735306 - DNA, 188342 bp, Homo sapiens
ctccaaggctgagggatgaggagacctgctgaggacccagggccttatctttccatcccactccataggtcccagtattgactgatgctgtcttcacctcctagcctcacttttaaccttctggcacccgcccaccactgtccagttcactattgaagccctgccgtccagtgctgcagagggaaaggatgttcttctactggcctgcaatatttcagaaactattcaagcctattattggcacaaggggaaaacggcagaagggagccctctcattgctggttatataacagacattcaagcaaatatcccaggggccgcatacagtggtcgagagacagtataccccaatggatccctgctgttccaaaacatcaccctggaggacgcaggatcctacaccctacgaaccataaatgccagttacgactctgaccaagcaactggccagctccacgtacaccgtgagtgattcccccatacctctgggtgctggcggtcagttctgcttcacacacatgagattgtcaggcctgggctgtgcctgcatccccctctgcattttgtcccgtgttgagatttgggcatttagtgcaggacacacacatggtaggtaaacttcaacagatcagaattcctttcctgcatccaggccctgcagacactgatggcgggggcgggggggcctcagcagggggaggtcagtctcagccaagcaccccatgccctccccatgaacctgaccctgagaaagaccctggagaactgggtcagggcctggcctgagggcgtcctgggaacctcacaaaagcccagcctcaggactcctgactccgtgtgaccccgggaagcctgtgtcagggctggggtgtggtctcctgggcagggcttactgggagcaaggatttaccagatgtctgcgggctgtggttcctgaagcttctcatcagtgagggctcagctcccagagtctcatctagacaaggacagagcctaccactttccctgggactcagcctggagagggcagggggacaggattactagggcattggccccctgaatgaggagcttaagagatgcccttgggcagtcagtggcccaggggtaggaacagaggggagaaaatgttcctggcagcttcttgtccaccggggatcatgcccaggggtgctctcccatggaggcaaataacagatgctgttgatgtgaacacctcctctgtgccaagcttcatgtcagatcctgtgaataatttaaagttcattcacagacaaagtggcaagcctcagaccattttccatttacatattgtatggaggggaaactgaggcacagagagatacagacaccggccacggtgggcagatcgcagctggcagagtcacatgagggctgtctgcagctgctgccacgtcctctccttcatccctggtgccttactaggtgtctgtggaccttagaacagccactggttcggatgttttcttcttaggtgtctacagctcggagggggagattctggtctggagagttatgagtaaatacagaattaatcagttttttcttaactaaatcacctgcctcaacaatcagtcagtgctggggaagttcaggcctcctcgctcaggtccacaccccgcatctctggacatgaaatggcttcgtgtgttttctgatgtgtgggtatcattccaacaggaggataaaggggaggactttgctttctctccccattcacaccctgcaccagccagggcccagtgtgagacacatactccgtagttctctcatgaaggagggagggaatgaatgaaggaatgatctataacctcttcagagacagagacctggatacaagatcctaggaggttctgggcccaacgtgagacacacactctgtagttctcttatgaaggagggagggattgaatgtaggaatgatctataacctcttcagagacagagatgtggatacaagatcctaggaggttctggccacacctgttttctgtccctctagagcctaagacccatgtctcattcatctggcccgtttctcctaaatctgcccctgggagctgagtctcatctgaccctggggctgcagggctgtgggaaggttttcaggggagggatcaggcttgcgggtagtcccacacgtttgccttacaccctggagctctacctggttctcactatgaatatcccataataatcccccctatcctttctggggagtagaaaaaaagtaaatatttaaaaatatgccagagcatctgttcttcttagcaagttcagatagttattagttagcaggaataaatcgttattttaccagagcctcacctgctgggggtttatgggagcctaactgactgaggggggtgggaaatatccaactccagccccctctagccatcatgtcccacctaaaggagagaaaaaactgagaggcacttgtgacattcacagcccagggcacagactctatccaggaccacagaacccctccctccccccactcaccaccgcatcactgaacgcctgctcacccaagttcctgttgcccagtacatcatgtcctggctttcaacaaaaactacaagacagactagaggcaaaaaaaaaaaaaaaaaaaatgcagttcgaaagacagaacaagcatcagaaccagatgcagatgtggcagggatgtggcagggatgttgaaattatcagaccaggaatttaaaacaactctggggccaggagcggtggctcatgcctgtaatcccagcatttgggaggccgaggcaggcagatcacctgaggtcaggagttcgataccagcctggccaacatggcaaaaccccgtctctactaaaaatacaaaaaattaggcaggcatggtggtgggtgcctgtaatcctagatactcggaaggctgaggcaggagaattgcttgaacctgtgaagcggaggttgcggtgagcctagattgtgccactgcactccagcctgggcaacagagcgagattccatctctaaaacaaacaaacaaaaaacaatactggctaatatgctaaaggctgcaatggaaagcatagacaatgtgcagaacagacggatgctgtgagcagagagatggacaggctaagaaagaataacaacagctactatatctatctatctatctatctatctatctatctatctatctatctatctatatatatgtatatatatgctagagatcaaactcactgtaacacctggatctcagagtggttgtgaggatgtttattaggagattaaagagattaaagcagagttatacacagggcgagagctcaactgatgctatcaactagtattcttatttttttgatgttgttattggcaataaaatcaggaacaatgcagtaaaaatttggttttatcatgtacgagttctgtgaccttccttgacttactgaggtactgtaagtctcagattctaactctgcagatggcggtgatgcccctctccctcaaggtgatgtgaggatgagatgagctgtaggtaggttggtgcccactgtgcctggcacatggaaggcccctgaaaatagtcaatgaacatcatccccgctcatcagcatggagttgacagtgagggctcgctctctgtgacaatcatggaatggaaaagaagaaacaagaggaagactgggcgcagtggctcatgcctgtaatcccagcactttgggaggccgaggcgggcagatcatctgaggtcaggagttcaagaccagcctggacaacatggcgaaatttcatctctactaaaaatataaaaattagcctggcatggtggcacaaacctgtaatcccagctacttgggaggctgaggcaagagaatcgcttgaacttgggagatggaggttgcagtgagccgagattgcgtcagtgcactccagtctgggtgacagagcaagactccatccaaaaaaaaaagaaaaagaaaaaagcaacagagggaagaggtgtgacatgagaggaagaagggatttaaaggtacaggagcagggcgaggtgcaagcacctgtgggagaatgtaggagttggtacatcccagtgtgtcaagtctgagacacagaaaatggtgcaaccgtggagagcaagggagtcagctatgaggacagcccaacagaccacactcaggctctggagcatttccttcctccctgactatgcccctgccctgcaatgccccttatggtttcccttggaacaaacttgggccttgtcccctttgccttcccctttctgcagaaaacaacgtcccaggccttcctgtgggggccgtcgctggcatcgtgactggggtcctggttggggtggctctggtggccgccctggtgtgttttctgcttctctccaggactggaaggtaccgcagcttttccccagcctcctcccacccctaggctgaccccagtcagggaggagggagaccccgccctgtattcagggccaggctttccgcatcctcccaaggaatccttccctctcattccatggctcctcccttgccagctgctgatcctaggctgcctcttcctttatgaatgtggcacagttaaggttgcacccctgagtgctgtcctagttccctaacacagcaaagccacagctgcctggagggaggaagggagggagggagggagggagataagacgggagtgctcagaacctggtaccttctgctgttcattgaatttacccacccagtgaggagggatttgcaggcttgagatccatggtgggggtcctgggcatggtcacgcagtggggagtggcaaagcctggacaggctgggtagggtcagcaccccatcgtgattgatgtccctgaggtgtgagatgggagaacctggacctcaggacctgctgtcctttatgtctcttgccaaggggtggagagagagaggacaaggccattgccccatttcagcatctccaggcctgaaaggagggtctggccatggcagggatactgagttctgggagaatatgatacatgctccttgcctccccatgcccccagctcccccagtgtcctgcacacacagccggccctgctttccctctggggccttgacccttcctctcaggcaaacgcaggtggtctgattccctccctgagtcctcagtccctttcctgggtccctgggtcaatgttctcctcacccggcatctgcctgggggggtccttcctctctggccaggacagacgtgactgcttaaggcctatcctcagctccccgtcctcggccgctcctaccacgaaactgatggagacaggaggccttcactccagtccttgaaaatggagtcccttccttgtcctttattctgcccctaaacctgtgatttctccctgcaccctcatgaataatcctgacctttcctagggccagcatccagcgtgacctcagggagcagccgcccccagcctccacccctggtgagtgtcccttcagcccaggtgtgggagcccctaggcctgccctacggtgtccactcctgccagtcaccccctgggggcctctgaccctttctttggggctgcaaggaggatgtcaggaaacatgacacaggggaccccgactgtcttgttcagactgatctgtgggctctgggtcgtgggtcacctcctcgacctcagctgctcaggtctcccctgggaagaggctccctctccctgattctctgggagctgaggacccctacactctcctgcaggaggggcccaggctctcctcccaccctgctgctcactcctgtctctgtccccaggccatggtccctctcacagatccaccttctcggtaagcctgttccctccccagcccttttctactggggtcccaacagtgcaggctcagggcagggggaccatcaaccccacagcacagcactgacccacctttccccagaacagtcaggtcaaagtgagtgcctccagccaggatccgggcctctctacagggccaggaccacccacgccatgtgctgacccctccccgggaccctctacacctgaggagaaccctggagtccagcaggtgcagaatggacactgggaccatcagtcagaggcccacattaacaagggtgcggggtgggcccagccaggacaggggtcagggtgttgtgtccacactgggaggctgagctcaggggcagagctggtcaatcctgaggggaaatgagtggaagtggaggcagggaagtaagtcctggccgatcagagacaggaaccttccaggctgggcttccgtgaccctccctccctgtcccctgacatctcctctctcccctgcccaggcccctctacccagccccagaacagccactcccatctatgaggtgagtgtgggccatggatgttctggtcccgcaggctccaggggacccaggatctgcccccaccagcacctggctgagctcagattcaggaaaatgcagtgaaaatgagaacaggtggtggtgagcagaggagggaggggcctgggaacagggaccccctgagcacagccaggttcagccccagagaagccctgggtgggcccagagcctgggagatgccagacactgttctgagaaggctacaggggttgaggcctcttctctgtttttacaggaattgctatactctgatgcaaacatttactgccagatcgaccacaaagcagatgtggtctcttaggttcctctgggagctgctcttgtgggttgatggagcgtccccaaagctcccagccctggggacggggaaggacatggagcctgagccagagaaccagctctgagtcctgaggagacacaggcctggggacagggagggatgggagtccctgctgaatatctggagaccctgacaggttgccctgggctctgggtgggccgggacaaaggcctctcatcaccacaggaagcgggggcttgcaaggaaagtgaatgggcctgtggcccacccggggtcaccaggaaaggatctgaataaagaggacccttcctctcattggctctttttctgctcacgggaacttagcagaaactcacctgaaactccgtgtccattctctcccgggtcacacagggaaaatatctccaccttgtctcaaccacagtctctcttccctgggaggcagaaataggggttgggagtcaggctggggtgggccctacacaggaaagggcaagattcacatgagccctgcccagccagccgagcgctcagctgtcctcacactaccccagggaccaaggccatgcacagccccagcctgggtccctctgtgaatgcatgtggggtctcaggagcacagaagatggggccatctgatgtccacaaaaggtgagcaatgcgggagcaaccatgggtggtataggttgcggctgtggcccctacgcagcctccagtgtcctgacccctgctgccctcttcacccaggccctggaggcccagtctatcactgtcctccacaaatgaacttacctgtccccaaatccaggatcctgtgtgcttatacctggccactaggttctcctctgtcccagtggctactgctcaggacatctttatccctggtggggcacagagaggggctgtcagagcaaccaagattaatacagacgcataattcagtccttgagcactacccaggactctggcccctcattgctcatcagttcccactttaccccctggcatggatctcactgagcaagccaactctttacacaggagcatccaggtcagaggtgcaggactcccccatctaaagctcatgcaggctcccatggcgatgggacaacctgtctgctcctctccctggcccacagccctatctcgcctgcagctcctccacacacctgggacagcagttctcagcccttccctgagggcccctggaagggtgatgatctcatataggttcacttgaaccaggtgccaccttcccacaagtgagctggtgcctgcactaaagcacagagccacagttcccaagagtgttctgccactgccacaggtcccaagagtgttctgccactgccacaggttgttcgtcctgagatgagaggtaagaaaacaacccgcaatgggttgttttatatcgggatttgcatcaggatttagctctaaatgacccctgatcccacctgcacacagcgtcagatgagacaaggtgaggcctctttagttttctgttgaggctgtgacaaattaccacaagcttagtgacatagaaacctgaaccaaagtgcccacatggctgtgttctttctagaggctccagggaagagtgcatttcctctccttttccacctcctagaggcctcctgcaaccttggctgtgtcctctttctccatcttcaaagccagcagcacagcatcttgaaactattctgtgccctgcttccatccccacatctccacctcctcccacctccctctctcacttaaaaggaaggagccttgtggttattttggacgcacctgggataaaccacaacaacctccccatctcatgatccttcctttaatctgtaaagtgtcctttaccacgtgacatgtccacagatctggggatgaggatgtacacatctttgagaggcccttgttctgtccatcactcctctcaaggccatcttctcatcatcgttcactacaaactacacatgggcacctggatgggttcatcatgactgtggcgtcagttcctgcattaacatccccagcaccctccagatcctgagagagggagacggagggctctccatgcccctagtacctctccaccttcttcttggtgacatgcttagttgctaagaataacagaaagcggaggtgactgaaagatcacaactcaccggcccttcaatagttcgtggacatcagcaccacggacagtgactcagtgaggctaatttccaggtggcagcagggagcatgcagataggagggaactgcaggaaaagctgcccattctattctatatgagaaagagtgtaagaaagaggaagctattacagggataatgctattcttctctaatccataaattgcgaaacctttgcatgtctggatatcatggtttttagcacatctgctgccactccctgcagggctgattgctgcatccaggatgtggtctcttggggggctcacagcctgctttggcctcatggtgagtctccctgcccctgacactcaggccactgtctctgcctacaacatggtgggaaccttccatgattaacgtctgattctctgtgcctgacctttgaagcacatccatcactcagcctggagcatccgctgagctcagcatcctgctcctccatccccagctgagcccttgaggagatgcttgagaggatctcctgggctcctctgtgagctcctccaggctgagccttgtgcttggtgtcagaggcctttgccatctgcttgttctttccataggcaaataatcctcctcagggacaagtggggcctgaagatctgtctgaatatctatctatctatctatctatctatctatctatctatctatctatcatctatctatatgtatgtatatatgagaatgctttattaggcaaaactgcatactatgaacatgctttaaaatgcaacaggatgagatgtgaagacataaagaacaagtgtgtagtgacacatggctatcagaacacactgaagaatccacaccgcggccgagagcagtggctcacgcctgtagtcccagcacttttggaggctgaggcaggcagatcacttgaggacaggtgttcgagaccagcctgaccaacatggtgaaaccccatctctactaaaaatacaaaaaatttagccgggcctggtggctcatgcctgtagtcctggctgttcgggaggctgaggcaggagaattgcctgaacctgggagacacaagttgcagtgagctgagatcgcaccactgcactccagcctgggagatagagtgaggctccatctaaaaacaaaacaaaacaaaaagaatccacactgcttccccgcttcactttacccagaaaaggaatgttctaggccacttcctcttcagcacacatccccagggaactaaaataggttcacagtcacccccatcttcctcattcccatcacctcttacccacagaggcatctctggtcctacagatccagccctgccttcaagaggcacaggtccaacccatccagtgtccctgctagtcacacacagcactcagggtacaatggagggcttctgtgctttggatgggaacaaaccccacctcacattcccacacctgagaagccaccagggtcctctctgtcctgtcctcacactcaatgtctgtcctgggtcacccttgtcatctctcctggaaataggcatggctcctgacaggtaggattgaggctttgtcttttcaggagtccctcccactctgagcacatgaaactgctcagctccatgcaaccctctctcaccaggggccttgttctctgggtccctgaatacctgggtccatgccatgtacattttaagaaaaatgacagtgactctcaccctgacatcctcacccaaggcacgtgtctgacaagaatcaccaggtgagatacctgtggctccacacacctgaggcttcactgcgcaggggtgtcctcatccctctcctcccacccctagggacagtaagcaccacaggctgccttggaccaccagctccccctcccagacacagcctcagatctatactgacatgctacatggagaggctctgatgaacagcaggtattaggaaatcccaccgaaccaggtgccacttgcggccccactcctcctcatatctgtgactgggacagacacacataacacacctctgttcaccgcccagcccccaaggtcaatcacagtctgcttctcccctagatccactgctccccatgtcttccgtcctcagctgcatcctgggtggcctccttgctgttcttgtaccccagaggcaggttccaacctttgtgatgttgcctgcaatgcccaaactttcccttccccttccccttcccttttcccctcccccttcccctccccttcccctccccacccctatcccttcgtcttcccttgtcttcccttcccttccctataaagccaaacatacccatccacctaccttgtggtcaaagtcatcagcctcctgctccactcagtgttctctgaccctgcatatggaggtggtggcccctcctagaacacccaccactcactgtcagccttgcgtggtaatcacagattttgcaggggttacctgtgttcaggtgtgtcacctgtggaaccagaactcttggaaggactggcagagggagctgcttaggatatctcagggctcctggcatctggtctaccacagggctattaacaacagcacttagggacaaggtggaggatggacggttaagagggtaaatatggatgatgtgtgggcaaagaataggacacaggaacacatgcagtactcaaataattatgccaagaaaggtgaggacatggagatggacattcccatatacttctgatgggactgcagtttagtccctacagcaacattgacctcatcatgtttaacgcgcacacgctctgaccactatcctacttctgaaggcctccctgtgctgtgagctctgagaaggccaagcttgcctgttctgtctctgctaaagccagagaccagccaatagcccagcacagggtacttcataaatacatgttgaaggaatgagctccaggaacagtactccacatggtagagatgtgtgtatgaggatgttcactgcagaaggtcatgtcaatgtgacaagtgacgagcagcctcaaatccagcaacaggggtgtgggtaaaagatcatagtgtagccatgcaatggaaccaatgaaaaaaccacaattagagcaaatccacatgtattaataaaggaggtgccctccatacatgctgcacctaacagaatgttgccaaataagaatgaaaaatgatgatatttgggctgtaaaaactagaagtcagctaaataagaatgcatcgaaagtatttgtgaatgcttacaattttataatgccttggcatccgttttggatggaagttggactttctcataccagaagcagggctcagtcacctttgaaatagtttccagttctccacctccttccagttcctcagtgtgattgatcagatatctgatttatacaactgcctcctggtgacctcctccctatgggacttccggatacagcccgtatgactgccccactgaccccacaccctgcctgctgcagtgaccacctctaattacctggatctcatgtctgcttgcattaaatccaccaattaaaactccctgaggacaatctgtttgaataatattctgtaccctaataaaggccttgacccatgggttccccctctgtcctccccatactgcccctgacctctgtgtgtgtgtgtgggtgtgggtgtatgtgtgtgtgtgtgtgtgtgtcctccagacagggcctgtatcccccaggacctgtaagtaataaatctttattttcatcttatgtctctcgcaatcattggcaagagctctgcatcttaaagatcgcaaatttaagaaattggtgtagtcggcacaatagagtacctcttctgtttagcacaagatatctcggagctgctgaggcttttaacatcctcgccggtgtggctgcctcactggtgaggccgttctgttcagtgcaattcagttgctccactgtgtgctgctgtgttgctgctgtagagtgctgccatgttgttctccccaaattgttaccgagtaggaacctgtaatgtgctcccaaggtggtctaccccatgagaagggggattctccatctagggcaagggctaggtgtgtttctggaatcctaatagggaaggcatccacagagggtgaactccactcctccttagagtgaggagtgacatttcccatttattttccccatggaggtgccatgtattgactttttctttcactgtcccaaggttgagccaaggtgagctatggagaccagggcaagataccatttctgttagcaaagcaaatgggtgacaacgtgtggagaagctgtggttctcctgatggatatagcagagtgccatttagtaaaatcttgtcaggaggctgcccctggttagaccggcagtgtctgtagtcactaaggtggatgcgaattttaggccctgggccatggataatccctgcagacacagccgtggcttcatgtgatggggcaatcccgggctagtggctcccttgtttctgcatttcttgctgtggttgcacaatcaacacctcaggggttgattgggtcaccttggaaagagaaacagctgcctaggaggctggtgcacatggaggccaccctcaattttattctgctaacaagttgtaagattaaaacaacagggggctttgggtaccatcaggaacttgtcaagtaaacatccaaagacagaaagaagaaaaagaaaaagacattaaccgtctagaaatacaagccattttaaagattttgcttaaaagatgcgcttgggctgggagcggtggctcacacctgtaatcccagcactttgggaggccaaggtgggtggatcgactgaggtcaggagttcaagaccagcctgaccaacatggtgaaacctcgcctctactaaaaatacaaaaaattagcagggcatggtggcaggtgcctgtaatcccagctacttgggtggagaatcgcttgaacccgggaggcagagacggcagtgagccaagatcgcaccactgtactccagtctgggcgacagagtgagacttcatctcaaaaaaaaaaaaaaaaaaaaaaaaaagacgggcttgtttcgtcgttgtggagtcatcccagagagaggctactccctagagtcactgaccacctttcctcctccatcttttcctcttatcattctagagacagaaaacaagaatctcagctttaggtggctaacctcaccccccaagaaaagaaactaccactttgattgactacaaatccaagaaaaataaaagagaaactttaaaaagtactgagcaaaccacaggtctagcaaacataatgctagccctaggttacttattcatttacaacaaacccctagatataggaggaaaaaataaaaggtaattaaatatatacacatacaatattttaatataaatatataataaatagttaaattatgtatgtataatatgtaactaaatcaaagtaaaatttcatactttgattctattggaaattcaaaattcatttattaacttatatattaaggaatttatgtaaaaaaagatttttaaaagggcaccaatttgcttttgtgtctctacaacataggatctaatttaactttacatttgctaaatacactaattgacaaatattcatggatttaatcaatactggggctcaaattgtagccacacgtgggaatcccataaatttaaacactctgtccctattatcttgagaagaaaactaaatataaaattgaaaaaaacaggtatgtctcaatttacctgtaactttgcctaaatttcccggagtcatatacccattgctgtaaaacattctctattggacataggtgctctgagacaataaataaaatagaagtgtttttggtacttagacattggcttgacaaaatgggatcccatgaaacctcagttaagatagtgaatacggcccaatgtgagttgaaatggggcctttaaggattaaaacttattacatgaaacctagtaagtaatggggtgattatccatactgcttctccatttcatagcccaattttgacagttgtcaaatctggaaaaaacaaacaaacaaacaaaaaaacccctgggaatctgttgcctcacagagacacaaagtagacatcaaaattgtatatctcagttccagttccaaaatggtggcatagaagcaagctggctttactccttcacacagaaaaccaaaaacaaatatacagcaccaaaattattaccagatatattccagaactcaaatatgaaaatgaaacagttttcagagccacagagaagtgaaaaaaactcccgacagatgacaaaagaatcagatttccccatctgtaatgtccctccctgccccattctgcctggtaccaggtgtgtggaaaattttaccccaactcatggtttctacactgggaaatgtaagatcaatgcgggcaaccagtttctgcacaatcctgggttccctgtccctgccttaacccacaagaagcattgtgagtgcccgaagggagaaatttccctgaggacagtcaaagagtggggaggcaggactaccatctccttccctggaaactctgctgtgtaactcagccaagggagacatgaaatcagactggtgtttcagcagctccatgttgtagtaggtttgtttcacaggtatcctgggcatggacatctagccagctttcccacactgccaggatatcccctttgggacctccctcagttaggaagggcacactctgatcatttactagggccaaggtaaaccctaaaggtaacttagagatgaaaaggaggtagtgacctagcagtaaagaactctaagaaaatctatccaataaaaatcaaaacaagccagacaaagactaaaataaataatgaatccttcaatgtaaagacctggacttacatccacaagaaacagtaagcaggtaaccatgatctccccacatggacaaagtgaggaacaagtgactgatcctgatgagatggtgatgtgtgagctctctaatcaagaattcaaaactgcagttttaaggaaactcaatgatcttcaagaaaacatggaaaagcagttcagaaatttatcagagaaatttaacgaagggattgaaataatttaaagaaaacaaacaggaatcttggaattgagaaatatatttgctgaacaggaaaatttattagagtctctcaacagcagaatggatcagaggaaagaatcaacccaaataagactcccccaaggcataaaataatcgaattctcaaaagtcaagggcaaagagaagattttaaaacagaaagagaaaagaagcaaatggcataaagaagctccaattctgtggcaacagattttcagtggaaatcatacagaccaggagggagtgacatgacattctcaaaatgctgaaaaaatattgacatttgagaatactttatccagtgaagttatccttcaatataaaggagagagaaagtttcctagacaaacaaaagctgagataattcacaccatcagactagtcttcctgtaaatactaaagggtaaatactaaatacttcaatgtgaaagtaaaaaaaaaaacactaacatgcaaaacaaccacaacaacaataacaacatttgaaggtataaaatccactggtgaaattaagtacgtagacaaacccagaatactcaaatagtaattgtggaaagtaatccaatcataactctagcatgagtctcaaaatataaatctatcaaaaacaataatacattttaggaggccaaggttggcagattccttgaggtcaagagttcaagaccagcctggtcaaaatggtgaaaccccatctctaccaaaaaatacaaaaatttgcagggtatggtagcacatgcctgtcgtttcagctatttgggaggctgaggcaggagaattgcttgaacccaggaggtggaggttgcagtgagctgagattgcactactgcactccagcctgggtgacagagggagactctgtcttaaaaaaaaatagctacctgtttggagaaaggtaatataaaatatgtaaatagagacaaagtcaaaatttgcaaaggatgaaattaaagagtagagtttttttggggggttttctgtttctattattttatttgtgatctaagataagttgttaccttttcttctcttgaagatactttgttatatctatgtttttggaagtcttatggtaactgcaacgcaaaaaatctatgatagatccactgaaaataaaaaacaatgacttaaaacatactaccagagacaatcaaccacaaggaagacagtaaaaaatgaagaaaggaagaggggagttacaaaacaaccagaaaacaggcaacaaagtggcagtagtaagttcttacttaaaaatattgaacactgaatataaatggactctattctccaattaaaaggcatagagtggctgaatgctgcctatatgctgcctacaagaaaccacttcatgtaaaaagatacaaatagactgaaagtgaagggggtggaaaaagatatttcatgcaagtggaaaccaaaagagagcaggagtagctatactgatatgagataaactacaaatcaaagactataaaaagagacaaagaaagtcactatgtaatgataaagcgctcagttcagcaagaggagatgccaattataaatatctatgcatccaacacttgagctcccaagtctcccaagtatttaaagcaaacaatagtggatctaaaaggagagatagactgaatacaatattaattaggggactttaacaccctgctctcagcaatggccagatctttcagacagaaaatcaacaaggaaacttcaaagttaaactacacactagatcaaataggcctaactggcatttacgggacatttcactaactatctaactgttacagaattcacattattttcatcagcacatagaacattcttcagaacagaccacatcttaagtcccaaaaccagtcagaataaattcaaaaaagtttatatcacatcaagcatttgttctgaccacaatggaataaaactacaataaatgaataactttctggacacatacaacctaccaagatggaagcatgaaaaggcagaaaaacccaacaaaccaacatgaaactgtaacaaaaggaaaacccaggaccgaatgacttcactgctgaattctaccaaacatttaataagaactaaaaccaattctactcaaaatgctttaaaaaattgaagaggatggaacactttcaaactcattctacaaggtcagcattatcctgataccaaaaccagacaaggacaggacaaaaacaaacaaacaaacaaacaaacaaacaaacaaaaaaacactacaggattgcttgaggccaggagtttgagatcagcctgggcaacatagtcagaaccaatctcttaaaaaaaaaaaaaaagaaaaaaattagccaggcatggtggcatgtgcctttagtcctagctactcgggaggctgaggtgagaggaccaattgagcccaggaggttgaggccgcagtgagccatgtttgtgtcactgtactccagcctggggaacagagcaagatgctctctcaaaaacaaaaagcaagctgggtgtggtggctcctgcctgtaatcacagcactttggaaggctgaggtgggagaactgcttaagcccaggagttcaagaccagtctggacaacatagggggactccatctctcaaaaacaaccaaccaaaacaaagccaaaaaagaacataggccaacatcactaacaaacatagatgtaaaagtcctcaataaaatattaacaaaccatgtttagaaacacatcaaaagagatcattcactatgattaagtgagattcatcccagggatgccagtatggctcaacatatgcaaatcaataaatgtgatccatcacattaaagagaaccaagaacaaaaaccatataatcactccagcaagtgcagaaaaggcatttaataaaagaatgggttgagggagtggagcccatagtcagagcagcagtggtctgggattttggaagtagaaagaagggcagcaccactggccaggaccaccagggaacacccccataggccctgggtgttgtgctccagggagggttccctctggagttattaatcttggtgtccactttgcccagctgcccctcacagggtcagggaggatgaagggaaagcttccttctaatgaaagttcagggactcacagttcctagagcctgtagggagaggaagatcttcgaggaagagcacctgggcattggggcgtttgagaggaagatctatgccaggtccaagtggacaacctgtggactctctctccagggacatacgggtatctgggaatctcctgtagcttaaagaggtaaagacctctccctttagcctgaggactggaggatgctggttcaggtgaatgagtcctgcaggggctggtacaggcctggagggtggtggtgtccagggccttgggttcacccttagcatgattcaggccgggcggtgtttcacatgagcaagagggcctgggttcattgcttcaggacaatggtgaaatctcatggtggaagaaatcttgtccttgccagtgcccagctttcatttggtcttggcccagagtgtcctccctagagaagactcttgtcccttcttcacactgcccttcagggatatgccagccttatgggataagatggggtggagactgtagatgtgggtgggaatctctccacagagtgctccttctctcagcggttgcaccttgtctcagggcttcagcttgaaatctgggatctccaagcccttccctccccagtcctggccaggaccacatgggcagatgcattgtgtgaagtgcatttcatttggggtgtcctctctgcatggcaccctcccgttgattctctttgcgcatgtcagagtgcaggcaccatccacacctcctgctggaggagggacggagctgttgactcctgagagctgatcatgtgttcccaccctcacacacaatcatggtccatcctctgagggacatgtgttgccaccactgtggagatggtgcaactgacagtaacaaacagtaaaatctggtactgaatgggaccttaagccaacaatgacaatgtcattccaaggtgtttcatttttattgattcaatgcaagtcacctgatttcattgactattcacaatagctcgataaagtaaatgcatcatcaccaccactttaaagaggaaaaaggtgcttgggcagtttgtgactactgtggtggctgctgcattgctctctggtaaagccaagtaggtggtgggtgcggcctctgggctgggatgatccaccctcctggtggtggcaggggagccaagctggagccatggcctgtgcagtggtagcagctgaactgaccgctgctgcaggatttgcaagctgttacattttgcgaagccatgaagcacataaaacctcaagtagaacaagtgtttcaaagtctaccaaaatctgccttcagagattattactacagaggtggatatgaacccaaaatgacaaaacgggaagcagcattaatactagataatgaatgaacactagtaatagtagggtaagccctactgccaataaagaaaaaaataagagatgctcattaacatgttatgctcttaaatcacgcagacaaaagagggtctccttatatagtagccacaatcaatgaagctaaagatttactgcaagatcaagctaaaaacagtaggtgtataatgaatttttaacttcatattagtttatgtatatgaatatcaagtttttataataaaatgcctccaaacaaagaatatttgatttagggtttaataacttctaagaggggactcagatgtttcctgtttcacagtcagtctgagagggtcatttttcctggagctgacctgggtggaggcctcacactgatactccccagcatcctctctcctgatggggtttatgctgagcatacagtggccctgggacagctccattctctccatgagtcacagacgctggtcatggaagatccactggataaggttccagagtcatctgtggggcaggtcaggatcacaacatccttttcttctgtgactctggtgttgctgactcagatggggtcggagccactgaccctgtggacaatcagtggaggtgctcaactgaaagtgggctgagggcacgtcttctcctccatccctgggtccttaaggtaactgtggaccccagaccaactgacacaggagctagaaagaaattatttaggaagttagtgagggtaagagcgtccttggcaaggtttcccctttaacaaaaagcagcccaagataattccttttctaacaaagagcagcctgaaaaattgagctacagatgtagatgagcaagatggaagcttgcacaggtgaattccagtaggtgtgccaatagaaaagggctgcctggaagccaggtatgttcaacatggagactccatcctcccttttctccattaccacatgtacagtaaaaaaccaggcaacatggcaccggccaggtagacaatccatctgcatgacaaaagatcagagtggggcagccagcaaatggcacagctggtctaaacaatctttcaccccctgtataaatcagacactgcctcctgaagctcatctataaaaccttctgcatttcactatggaagtggcaacccattttccccaggacccctctctctgtgcagagagctcttctctttctttcccctatgaaacttccactcttaacttcactctgggtgcctgcatcctagttttccatggccatgggacaatgaacctcgagtattaccccagatgaatgatgctgtttcacaatcactggttcagctcccttcttcttagggtttcacagctcggtggggagaataccacgcctcagtggtctggggagtgaggaacaaatgaagaattaatcagattttacttagaacgctatcacctgcctcaaccatcagatccatgttgggaatgtccaggcctcctctcttagatctatacccacttcactggacctgaaatcctgtgtttcccgatgtgttggtgtcactcctatgagaggataaaggagagaactttgctttctctccccactcacaccctgcacaagacagggcccaatatgagacacacactcgctcagtagttctctcatgaaggagggagggagtgacctcgagtgattctgccatctgtagtctgtgtaccctggccagtggctgtatcttcatatgcctcagtttcccctcagtaaaataggacacacaatgagaactaaaaataaaattctaattccccagtgaactgaaaggatggcctcttggccaagcggatcccagagttcctgatcatgacaggatgggaggttacacctcattacagcccctccctttggaagtttagaggtgacaactgactagcattaacgctaaaatcgagatcatgagactgacagaacagactctctgtggccataagataccaaattataaactcaacctaaggtcatgcaggcaagggctaagccacactttcctacatttaaagaataagctatgttctaacacagaattttctttctctctagcggctaaagtaacactagccttcgagataagcaatattgaaatgatcgcggctcatccaccaacactggctaactgacccctgttccaacagccacaactacacttcaattggacaggagactgatttcagtaactttctcctaataagagaccactgagcatggcctggttctgctggtatacagacacggtgcactgagtaccataatgcttgtttcatcttttgatgtataagacctaatttaatacatttaaatctgaattctccaccccaaagtgaacatggggtgcatgtagcatgcatgtttgttgatcacgcatgtgcgtgtacttcctttgtgagtatccatagctccacctataacctgttgaatatgtatacctggccaactcattcagcataaatctatcttccacattcccctcccttgaagtgcctgctattggtctctgctggaggctgcatcttctaccctggggaatggccagcctgcaggctgtaaccctgtgtaagaaataacctggttgggtgcagtggctcacacctgtaatcccagtggtttgggaggttgaagtggtagaatagtttgagctcaggagccagagactagcctgggcagcatagcaagatcctgtctcttaaaaaaattttagggaggagagtgaggatcagaaaaaatacctattggctattatgcttagtacttggatcatgaaataatctgtataccaaacccctgattacatatataacaaacctgcatgcgtatctttgaacctaagataaaagtttgttttaaaaactatctgggtgcagtggtgcatgcctatagttccagctactcgagactgaggtgtgaggagtgcttgagctcgggggattgaggctgcagtgaattatggtcccacctgtgagtagccacttcactcaaacctgggagacagagcaagaaccggtctctaaaaaaaaataaaaatagaaaaataaaatgaaaaatatatgaaataaagtctcctttccaaacgtacagatctccgatttttctgccaacaatgataaatggtcagtggcttgccatgttgtctgtgaattacttttaaaatattcacgatcacctgacctaaaggttggtaccaaggaaccgcctgaatacaccgtctctgattatttgcctccaacagagtgttccctgggcctgatctctggtggacaatgagctgctgggaacatcctctcttctctattcctcccctggggatgctgaccttcccttggagtctcctaagttccccagggcagtcggctaatgtcctagggagcttacctgtcttctccataccaagtctcatgtgaaggacgaggctttgcccttgcccagatgaggctctgggggctgagccctggctggctaccagctgcaagagccatggcccttggacagctggtaaatccttgttcccagtcagccctgcccaagatgcctcaacccagccccggcacaggcttcccagggtcacatggagtcaggatcctgggacaggggactggacaggggtttccagggctgagtttctgaacaggggcttcccaggggtcccctcactccaggatctgacatggtcctacaaggaacgtccatggggaggggacccaggagggggaactgacactgacctccccttactgagcctccccccaaccccatcagactgtccttcctctgtagcaagtgcctgcagggtctggatgcaggaaagaaattctgatctgtggaagtttgtctcccctgtgtgtgtcttgcactaaatgtccaaacccccaaatgggatgtaatgtagagggggacacaggcacagcccaggcctgaaaatcctgtgtgtgtgaagcagaactgacccccaacacccagagctcatgagacatcactgtgtacgtgaaactggccagttacttcttcattcacaagatctgtttttatgacttgtagggtgtaggatcctgtgtcattgttggtgacattctgtatcagcagacatgtattggggtatattgtctctcagcctctgtggcaggtcctggggtaattacttgagttcctagtacatatcctgtaattcccctttgtaccagttgtagccaagcctaaggcagattgtgggtgagtggaagaatctccttgccttctgcagcttcaacagtgacttgggcagtggtaggcaagttccagaaagttaaaagtgaggctaggagtggggagagagcatcagttaatactgggccctatgcattgaggtggaaagatggggccctaggtcctggacaggtctcttcatccctcagccttggagtgtgtgtgtgtgtgtgtgtgtgtgtgtgtgtgtgtgtgtgcgcgcgcgcgcgtgcgtgcgtgtcctactgggccaaggtcagcagcatgacctcccttccttcagtgcctctgaccttggcatttccctgtttggagtccttttccccaggggtctgcctggctccctccctactgccttcaggtcctgctcacattagggcatccttgggagaccccttccctgacacctctagagaccctgggtcttccctttctgacctttcgctgctgtgttccctccagggctcttgtcaatacttgacctcacattctagatacccttgcatgtctgtcttcctccctatgagagcatgagctctgtgagaacagggacttgtgtgatcttggttgcaccccagtgcctgggacaggctgcggactcctgtggatgagctcatgagtgttcccagggcccttcacaacgtgggatttattttccaatggctgaggttgttggctaagagctctgttggagttcaatcaggctggtgggaaaaatattagagatagttatagagatagacacaaatcttcttggaagaccaaaaagtttgcataactttggtaatagatctgactgaaggtggtccctttacctttagttaaacaaattaaagtagtaacaaaggaaggcagagtagtttgtctagccagcttgtttactcatgtgatcttaagactaaccattgatgtgccacaggtgcttaattgctttctacttgggaagtccacaatgtcaattaccctctaacggtgttgactcaagcctttgttaattaatcttactgaataaatatgagtctcactagctgatcaaggccatggtcacaactgtttataggactcagcagggagtctgtaagcggccctgacagactcagctggactggcaaagcaaaatatgtgtgtgtcagtgtacactattcacccgtcccccacagctggtgcccctatatgaggagtgctgccacagagctctgtttagtgtcccttgttttttttcttgagtattaccccaacttaaattgtgattattgtcatctgttttcaacattaactgctcagtgatgattcacttggaaaacattaacaatcgagattgtttcttcactaacaacctcagattatttagattttcctgttgtaatcccttcttcctgtttagtgtccaacagaagccctctgtccctctcaggtccccgttctctccaagaaaccccagccagtctctgtgctccctcctcccatccactcccagggagccctcccctcacctgtgagcagaagcgcctgccagggatgtgcactctgtgaggaggggctgagggaggccccatgggctctgctgtctgctttgtcctcctctgtggagaggagcttgggcttcagaaaataaggaggccagaaagtaaggaacaggctgagaaataatggggatgtgtcgaaaggtcacagatgccaacatctttgtcctatgcaatattatccataaaattacaggtttgagatatgcttaaattttcttctaacatgcattaaaataaacatataacttttaatagttatattaaattgtatttaatataaattaaatgctcttgtcagagctactgtgactgtcagctctgctgtccttcctctctctgtgctaagcctcctcccagggcagaagcacttcccagggccaggggtgggggcggggaaaggtaagtggcaatgaggatctgcacaggtagcctttccgcctcctcccctctcagtcctgcctccttgtcttcttttcctctttttctccaatctacatttcagttccttagaccacgctgtgagaagcaaggcttattgggacccccatcccttaacaggatgacctgtgctccccataagtgacctctgctgtgtctagggattggctctgtcagcacctcacagagagtccctggggcccccaaactcagtgttattttctctatgacacagaaacccctctgggtatgcaaggttttcctcatgttttctaatgtctgggaaggttggatttactcccagcagggaggtcacagagatgtccagggagtggggtcctagaaatggacaaatctagagctaaagcccaggtctacgattttcagttgtttttttctgcagtgctatgtgaccctaatttcctaggagtaactaaaatgcaaacctcagacatttgtagacattttatgatttttctctacagcttgtaccactgttattattatttgctttatgctttttcctaaataaatttactttacaaaacatccttgtcctagtagggtgcaggggctcacgtctgtgatctcagctgcttgagaggttgaggtgggtggattgcttgaggacgggaatttgagacaaaacatctttgtcctatgcaatattatccataaaattacaggtttgagatatgcttaaattttcttctaacatgtattaaaataaacatataacttttaatcatcatattaaattgtatttaatataaatttatatacaatacatttttatataataaattatatatataaatgtatatataatagtttttcttttttgagatggagtctggctctgtctcccaggctggagtgcagtggcacgatctcagctcactgcagcctccgccttctgggttcaaacgattctcctacctcagcctcccgagtagctgggattacaggcgcctgccgccacgcccagctaatttttgtacttttttagtagagatggggtttcgccatgttggccaggctggtctcaaacacctgacttcaggtgatatgccgcctcggcctcccaaagtgctgggattacaggcatgagccaccatgcctggcctatatattttatataattatataaagttttctataataaattttatataataatatataaaatggatatttatttaagataaagttattagttttatatatttacatatatttaggaataaatgtgttactgtgggagcccagtgcccaggcaggtagtcagtacatgatggttgtcattagggttaatactttggaattctggattttttcccaagagagtgtctacgctggaatattgggcttgtggctttctgctgatgtgcatgtgtgaagaagctacttccacttattaggacttgtgtatctgtctcgcagtttcactacctattttctcgtgatgttggtcaagtcgcctaacttttctgtgcctcatttacctaatttgtagaatatgggtaacagtacacaagtgtgagtgtgtatttcccaggactgaccactagagggcgtgaaggcaccggcacttactattacagcaatgggtgtagtagtgctcatggtcgtaaacatcattctcccatgaaaggaaccagggcttcctgggagaaataactgattccagggctggggccggaaagcacaagcggagcctggagcatctcgtgaggccagaaagtaaggagccggctgaaaaataatggagatctgtcgaaaggtcacagatgccaaccagaaggagctttgaatgaccaattttgagacaaaatgagcactataagaaataatgatagtaataaattccaacccataaatacccatgagttcctactaatataaataaataattgaatacataaatatataaggatgaagaaacagctttttcttacagcagaattccaattaatgaatgtagaaggaatgatcaaatagaaaatcactatttggctaacagcacagtcaattgtttgtaggcaagaattatcaatggactttaaatatgaatgggtaaaagtatgatgatgctacaactagtgagtaccaagggggaaaaaaaagtacgttgagaagaaacaggctacttccatattcccaaagtatcacttcaggagctacttattgattataatgggacaaatagtaacttacagtagagaaacctggcaacagagtctctccgaggtacaaaggctctcttcaggaaggaggtaaggggaaggaagaagaaaacactgtcctgcctcaattatttgctttccccattctcaagtgtacttcatagacattcaaagatatgtgttgatagtgtccacgatccacatggctctattatagtcatttattcacacatacattcagtgaggctttgagtgcctaatgtgtgcctgatatttgctagatggtggatgctgagaagatcaggtgtgctgctgtctctagggtgactgaatccacctgccccactttacagatgtggaaattaaagtgaaaaggatttataggattagttcactgtcacaaggtcactagccttaaagttacaggagtaaagcaagtttcctgacttgctagattttctgctgcaggtgctgacaatggtgagctccaataggagagaggacactcagagtgaagtgggagccctgaacaccctggattagccaagaggacatgccgggtccagctgtgaccgcacaaaggaccattggggatatttgtattctctttttcacttagagcttgaaatgaggaaaactaagtgcagaaaaccaagagtggaagatttttcacaaagcactggtaacatgcatcagaaaaccctgtgctgatgtctgtcacggtgtttctcactgaacggtaatagtctggctttgagtgtgttccctctacagcctggagttctgcgaggcagggaccaggtgtgattcatctttgtctctccagtgacagtacacagcaggctctgataaatatttcttacaaaataaaatggaataaaaagtagacatctgcacaggtgtgggatgactgagcagcagcagaagcaggaaaagtcagcgtccccagatcagctgatgtggtgttcggattctagataggggtgaggtgccaggatggggatgggggtcctgtggctctgctgccctgggggacacccctaggtttcacagtgcctgctgtggttgctgcactttgcttccccatgggaaagtgatcagagggtgtggggcttcaggtgaccccatgtgggaaatggccaagggaaggtggggtgggcggcacatggttttttttaaccaatatttgaaggtaggttgtatgaaaaggtgttaggcttatttcagcttatggggagtaggacagggattggtgagtgtgtatcaggtatattttggctcaggatggaaaagaactgtcacagtaacataaggtcttttgggaaattacatgtttactggcagagttcaggccagggctgggtgtctgaaaatacctgtcagggtcacttttatggttacaagggcagagcttggcttggaaccaggtttcttactaataccacatattaagtattataaaaactgtcctttgcaataggacattgctctatgatgcaggttgaggtccctctgtttaagtaattgtgggtggctgtgattctctcatctagtctgcgacttggacttcacctccatctgcagtccctctcctttgctgttgacactggtcagagttaagcgcatttactgacgatggtcacagggtggcagcactgcctctctggtattttctaaaacctcttcctggaactgagccagtctaagaggatgtcatgactaagaaaagggcactaatgaggtgaacagataattttttttttcttgtttctcctgtgaagtaacagagtggaggtgagcatggaataattgccttttagaaatggaagacaatggagagaagtgtttcgcaaaccttaatgtgttcacagatcccacacagatctttttattcaatacagattctgatttttctggtgaggcctgagattgtgcatgtctaaggagcttttggatgatgccattgctgctggttggcggaccacactttgagtagcaaggctcgaagatcatttagaggttaattctcactgcatctaatttatggatgaaaacaaaccaaggtccagagagagcatatacagcttgcctaacaaagccattccctaagtgcctgacttcttgcatttaaacccagggcttcagcctttgtccagttctcactccacacatcacacggtttgttcactgttgtgaacgacagttgtggcagcatctctttagtttaggaatccagagccccaatttcactaccctctttggtcttggctcatgctgtgacttcgaatagttttgcccttacttaaaatcttcagtggctcttttgtaatcacaagatcaagttcgaatatctctgtctagtgttcatggctttataacatatggtatctctttagtaaccttacctaacttccctgttttaaaattgtctcttgctgccatagccctccttgctccttcctgctccctaacaaactgtgttcacttctctctcagtggtagtgatgatggcatggcctctgatgttagactcatgtaacttctaatcccagatccaccaccaacattggcaagttgattcatctttctgaggataagcatcctcctctgaaataaacttagatggcggttgagaggggtaaataaaataacacacaaacccactctcatccctgagaccctcttcaaaactagcatataaaaatagctatttgaagaggttcagtgaaattcaaggtaacacagagaaggaattcagaatcctatcagataaatttaatagactgaaataatttttaaaaatcaggcagaaattctgtagctgaaaaattcaattgacaaaccgaagaatgcactaaatctttcaacagcagaattgatcaagcagaagaaagaatttgtgagcttgaagagataatatatgaaaactcagagtcagagagacaaaagaaaaaagaattaaaagaataatgcatgcctacaaggtttgattattaagctactcaaagagatacaagagaagggtgaaaaccaacataaagaaatgtaaaaaacaatcagaatataaatgaaaaattttctaaaatgctagctagtttttttttgagacaggctcttactctcatcacccatgctggagtgaagtggcacagtcatggctcactgcaggctcaacttcctgggctcagatgattctcccacattagccttccaagtagctaggactaaaggcgtgtgccaccaggccaggctaattttttgtatttttagtagagatggggttttgccatcttacccagggctggtcttgaactcctgggctcaagtgatccaggagattcactgccaaaaaggatataaccaagtcatatagtcataggttatctaaagtcaatgtgaaggcaagaattctaagagcagtgagacaaaagcatcaattaacttataaaggaaaacctatcagtctaacaccagatttctcatcagaaaccttacaaaccagaaggtattggggtcctaatcttttggcttcttaaacagaatagctctcagccaagaatcttgtgtagagtgaaattatatttcaaaatgaaagagagaaatacagtctttttcaggcaagcaaatgcttcaggatttgtcacggctagaccatcctacatggaatgttaaagggacttctaaatcacaaaacaaaagatttaaatagaacagaatagaacctcttgaaaccaaaaaattcaaatggcctataaaacaataacacaataagaaaacaaagtagataacgatcaacatgatgactggaacaaatattaacattgaatgtaaatgacctaacactccacttaaaagacacagattggcaagataaataaaaaatcacaaaccaaatatcagctgtcttcaagagactcacttaacatgtaaggattcttatagactcaaggtaaagagatgataaaagatattccatgcaaatggaaaccataagtgagaaggaatagctatccttatatcatataaaacagactttaagcaacaacagtaagaaaaagacaaataaggcaactatataatgataaaaggatcaatcaaacaagaagatattacaatcctaaatatatatgcacctaactttggagctcccacattcataaaacggttatgatgagacctaagaaaaaagatcaacacaaaacagtgagggtgtcctgggttttctttttattggacagcagtgtactagcctatcactttcccagtcaggggatttttggtctccccattcccctaccatgggttcatgccaaagtccatattttttattagtgtttggaattggattttttttttttgaggtggagtctcgctctgttgcctaggctggagtgtagtggcacgatctcggctcactaacctctgcctcctgggttcaagcaattcttctgcctcagcctcctgagtacctgggactacaggtgcatgccaccacacccagctaatttttgtatttttagtagaaacgagatttcaccatattgtccaggcttgtatagaactcctgacctcatgtgacagggaaacaggcactcagtgaacttcatgcgattgaggagttaatgataatgagagaagggctgtgaggggacagcactggggacaccagagcctgtgacgggctgagttgctgtgccttgggagatgcccttttgactgagccctgggaaggagggggtgtgggggcaggagctgcctgcagagggagtggcctcaggtgggcggccacctggctgcagggaagaggtgacagagttcgtgtgcagagcttggagggtgaggaggaggtgggttgaggtgaccttggtgagggtgaaccatggggggctgtgggccctgctgagggaggccagccagccctggacctacagggtggtttggtcttttttgtcccattcccagcatccactgagtggtgaaactctgcaggccagggaccatcccactggccagaaggagcgcacagtaggtgcccactcagtgcatgttgggctggacagaacctcactctgccccctgcccccagctttgggagctgcagcaaggtccctccccctagggatctccatgcctctgtctctgaggggtgagatggggagacttcaaagggccatctcagagtgtgggggatagagacgcagaagtgtgggggatagagggaggcctgggctctagacccaaaggaccttacacacctcctgagtcttttcaaatggtttcttctgttactttaaaaatgatgtaagtcatcatatttattgtaaatcccaggaatctaatcatgcgtaaaataaggtgtcttatccttgaccccaccccttccccaattaaatttccaggatgttaccactgtttgcagttggtgtgaatctctctttaataatactctgtttatctcacttgtcgttttacgccaaaatacccattgaattatattattgctgaagaccattcttttttttttttttttttttgagatggattcttgctctgttgcccaggctggagtgcaatggtgtgatctcggctcactgcaacctctgcctcctgggttcaagtgattctcctgcctcagcctcctgagtttctgggattacaggtgcacaccaccacacctggctaatttttgtatttttagtaaagacagggtttcaccatgttggtcaggctggtctcgaactcctgacctcatgatccaccctccttggcctcccaaaatgctgggattacaggcatgagccaccacacctgcccagaccattctgttctactgaatcatgtgtggtgggcacctcttatatcaatacatatggattttatcttgtgtttgttattggctcccctttttctcattgcatggctacactcaatgctttgtccacacccctgttcctgggttggaatcttgtgacagaaaatgaagtaacaaaggctaaagctttctaaagtggagtcaggagattgcaagacaattgcactttcaccagcaagagctcaaaccacagaatgttccaatagatttggataaacagctgaagtcagtattcaccagccttcaacatctcaactaggagaaccctaaaattaactaagcacatagaatggaatggacttgtgatttaggattccttctcagccaatgagctgcttctgaaaacaactttttgtggaaattacctgtaaagaaaaccctctcctgtgcttgtcttacagaacactagtcagggctgccctgattcagtggacccgaattgctattatttgtttcctaaacatatggtattttctgtgaccttcatctcaatcttttttttaagttactgggctgtttcccagttttcataatgacgagacattctgcagtgtttcatacacatgtcttttccccatgtggagtattgatccaggagctcattcagtcaacgcatgtttatgaagcatcctgtgccaggctgtgggctggtcactgtcttcagcagagagaggacaggcacagtcttgccttcacagagctcacagctcagggaggctcttagaagtgggatactggtcggagcatgtgcacattaaacatgatgaggtcaaggttgctatagggactaaaccacagtcccaccaagatcgcattgagttcctgtggtagaccagaggtcagggcccctaagatgtcctgagcagctccctctgctcagaagttttggttccacaggtgacacacctgagcacaggtgacccctgcagaacctgtgattaccacccaaagccaagagtgagtggtgggtgttctaggaggaaccgtcacctccatgggcagggttggggaagactgaggggagcaggtggctgatgactttggccagaaggtagggggatgggcaggtgtgcgctcatagggaagggaagagaagggagggcattgcaggcaacaacacaaaggttggaacctgccttcatggactgagaaaagcagggagtccacccaggctgcagctggggagggaagacatggggagcagtgggtctaggggagaagcagactgcgattgaccttggggactgggcagtgagcagaggtgtgttatgtgtgtctgtccccatcatagatatgaggaggggtgaggccgcgggtggcacctgggtcggtgggatttcatagtgcctgctgttccctagagcctctctgtatagagggtcagaatagatctgaggctgtggtctgggggaaggggctggtggtgcttaccatctctaggggtgggaggagagggatgaggatgcccctgagcagtgaagcctcaaggtgtgtggagccacagttgtctctcattagacatgtgttttgcgtgaggatgccagggcctggtggttattactgttgtcaagtttgcatgacaaggacccaggtatccagggatccagagcacagggcccctggtgaggggatgaggctcagatggggctgaccaggttcatgtggtcagagtgggagggactgatggagagacagagcctcaacccctcctgtcaggagctgtggctatgtccaggagagatgacaaggatgacccaggacattgagtgagtcattgagacattgaaggtgaggacagggcagagaggaccctggtgactgctgaaatgtaggatgtgaggagggctctgacccatgcaagttacaggacctccccacccccgagcccacagatgacccttaaattgggcatcctgagtgctgtgtgtgcccagcagggacactggataggctggacctgagtctctgtaagggcagcgctggtctgtaggaccagagtcttctctgtgggtgtgacgtgggcaggaattagcaagatgggggtgacaaggcttggcttggaggatctggtacagaagcccatgggcttggtcagctcagcttctcaggggctcagctggggctggaggagcaggatgctgtgctcagggcatgctccaggcagcgtgatgtgtgtggttccagggtcaggcacgggggtcaaaaattaaccatgaaaagttcccaccttctgtaggcagagaaaatggcctgattgtcagggtcagggagacttaccatgtggccaaagcaggctctcagcctcccagagaccacaccctgggtgcagcactcagctctgcagggtatggcaatagatgtgccaagaaccccaacatccagatgcatgcaaaaattttgcgatatataaaatagagcagatcaagtttccctgcaataacgttgttcctggttgtgtctttttcttgtaaactagacatggacatctttccagcagtctgttctcatctgccaccttcctgctgcagcacctcagaatgaacattcctgagacactgtccgtggtgctgacgaccaagagctatggaacagagtgtgatgtagaatcttctagttacctctgctctcctttcacttttaacaacagagcatcattaacaatgagaaggtggagaggtgttcaggatcttgaagtgacttctgtcttgctctcccataaccctgaagctgctgtagacattattgcagaaactgacaccacagtcaggatggccttgtccaggagcccatgtgcagtttgtagtgagcaaggatgagaaaatggtcttgaaaggggtgatggacagaacaggggcttttcaaaaatgtcacatcatcacccccagcatccgtgaatctgtcacatggtaagagaccttacagattaaatgaaggattatgagtttggaagattattgtagtttatccagatgggtccaacataatcacagaatcccttccttacaaatgagagagggaggtgggagagtcagagaaggaggaggagatgtggggatagatgcagaagacagagcggtgtcaagatgctgcactgctggctttgaagatggagaaagaggacacagccaaggatgcaggaggcctctaggaggtggaaaaggagaggaaacgcactctgccctggagcctccagaaagaacgcagccatgtgggcaccttggttcaagtttctgtgtcacttagcttgtgggaatttgtcacagcctcaacaggaacctacagaggagtcaccttgtgtgcaggtgggatccagggtcatttacagctaaatcctgatgtaaatattgcaggttgcttttcctacttcctatctcatggccaacaaccctggacaatggcagaacacccttggaaaccacggctctgtgctttagtggagggaccagcttgtttgtgggaaggtagcacctggtccaagtgaacctacatgagatcgttactctccccagggccctcagggaagggctgagaacagctggcccaggtgtgtggaggagctgcaggtgaggcagggctggaggggcctgtgggtccaggtagaggggcagacaggttgtcccatcgccatgggagcctgcacgagctttaggttggggaaccctgctcctctgacctggacgctcctgtgtggagaggaggcttgctcagtgagatccacgccagggggtaaattgggaactgatgggaaatgaggggctagagtcctgggtagtgcctgggaggaccttgctcaaggactgaattcttggtctgttcccaccttggttactctgacaacccctctctgtgtcccacggggataaagatctcctgagcagtggccattgggacagaggagaacctggtggccagagctaagcatccaggatcctggatttggggacaggcaagctcattgctgggggacagtgatagatacggcctccagggcctgggtgaagagagcaggagggctcaggacactggaggctgtgtggaggtcacacccacgatctgtaccacccatggatgctcctgcattgctcacctttgtgtggacatcagatggccccaacttttgcactcctgagacatctcatgcattcacagagggacccaggctggggctgtgcatggccttggtctctagggtagtgtgaggacagctgagcactcagctggctgggcaggactcctgcgaatcctgccctttcctgtgtagggtccaccccagcctgactcctaaccccctactcctgtctttccagggaagagagactggggttgagataaggtggagatatttttcctgtgtgacccaggagagaatggacatggagtttcaggtgagtttctgctaagttcccatgagcagaaaaagagccaatgagaggaagtttcccctttattcagatcctttccaggtgaccccgggtgggccataggcccattcactttccctgcaagcccccgcttcctgtggtgatgggaagccttcgccttggcccacccagagcccggggcagtctgttgaggtctctatatattcagcagggacccccatcccttcctgtccccaggcctgtgtctcctcaggactcagagctggttctctggctcaggctccatgtccttccccatccccagggctgggggcttcagggacgctccatcaacccacaggagcagctcccagaggaacctaagaagccacatctgctttgtggtcgatccagcagtaaatgtttgtgtcagagtgtagcaattccagtaaaaacagagaagaggtcttgacccctgaggccttctcagaacagggtctggcatctctctctgggcccacccagggctactctgggactgaacctggctgtgctcagggggttcctgctcccaggcccctccctcctctgctcaccacctcctgttattttcactgcagtttcctgaacttcagctcagccagatgccagtggggacagatcctgggtctccctggggcccaagggaccagaatatctgtggcccccactcacctcatagatgagagcagctgccctggtgctgggtaggggaatctgggcaggggagagaggggtgtcaggggacagggaaggattcctgctgtgtaggaattccagggctctcctcaggtgatggagggtcccagggtggggttagcacagggagtggatgatcctggccctgaacagaggcccagctcatggccagggcaggtctaaccttatccaagtcattctgggtagggtgggtttgtgctggggattgacagtccccctgccctgagcctgcacagctggggccccagtggaaatgggattgggaacggacagtcttacctaggagatggagctgtcagagggtccatggcctggggacagagacaaaagtgagcacgagagtgttaggatagctgggcccctcctgcaagagtgtgtgggggtcctcagttcttagagaattggggagagggagcctttctcaggttattttaggggtcaagtaagcaagtgaggttgaggaagtgacccatgacccagagcccggaggttagggctgacccggccagttggggtttcctgtgtgatgttttatgggatcctctttgcagccccagggatagggtcagaggcccctgggtgtaactggcaggagtggacaacttggggctggcttagtagttcccagccacacccagactgaagggacactcaccgggggtggaggctgggggctgctgctccctgaagtcactctgatcgctggccctaggaaaggtcagggttatttgtgaaggtgcaaggttaaaagtcacaaattggagttaaaataggggaccaggaaaggagcctatttccaagaggggtatggagacctcctttctttatggagttctgtggtaggaggggcccaggtgaggggagttgaggaaaggccttacaaagccacatctgtcctggccagaggggaaggactctcaggcagatgctgggccaggagaacattgatccagtgacacaggaaagggactgaggacccagggaaggaatcagaccaccaggggttgcctgagaggaagggtcaaggcaccagggggaaagcagggccaggcacatgtgcaggacactgaggggactgcatgcatcttggattctcctggaactcagtgtccctgctgtgaccagacactccactcagggctggagatgctgaaatgggacaatgatcttgtcttctgtctctgccctttggcaagagacataaacgacattccaggatatgccatattggggccccggttctcccttctcacagctcagtgtctgcagttaccatgtcagtcaaaggggtgctgaccccacccagcccgtccaggctgttccagtctccactatgtgataatgcccaggatcccccctcagatgccctctcactgggtggatggattcagtgaacagggggaggtaccaggtattgagcaccgctcccccctgctccaggcagctgtggctttgctgtgctaggaaactaggaccatgctcaggggcatggccttaattggactgaattcactgaggacaaagctgttgaggaagcagcccagggtcagcagctggtgaggaaggtgccatggaatgagagggaaggatccctggggagtcgggaggctggggagagcctggcactgaatacaagacagggtctccttccttctcgcctggggtcagcgtgaaggatgggagcagaatggggaaaagctgtggtacctgccagtttttcggaggagcaggaaacacacaagtgcagccaccagaagactcccaaccaggaccccgatcaggatgcctagagtgttgtcatctgctgaaagaagaaggcaaaggggatgaggtccaaatctgttccagggggaaccatgaggggccttgcagggcaggggcatggtcagggaggaaggaaatgccatggagcctgagtgtggtctgttgtgctgtcctcatagctggctcccttgctctccgtggttgcaccattttctgtgtcttaggcttgaattactgggatgcatcaactcctacattctcccacaggaagcctgcacctcatcctgctcctgtgttttttagtccctccttcctctcacatcactcctcttccccctgtttctttttttccatcccatggcagtcgtaaagggcaggcccttgctgccaactcaatgctgatgagcagggatgatgttcattgactgttttcaggggccttccacatggaaggcacagtgggaatcaatctacctgcagcttttctcaccctcccattgccttgagggagaagggtatgtgatattgtgaaatacgtatttggtgttcatcaccattgatatggttaggctctgtatccccacccaaatctcaccttgaattgtaataatccccatgtgttatgggagggaccttgtgggaggtaattgaatcatgagggtgggttttttccatcctgttcttgtgatagtgaataagtctcaggagatcagatggtttcataaagggaagcttccctacacatgtcctcttgcctgctgccatgtaagacatgcctttcaccttccatcatgattgtgagacctctccagccatgtggaattgtgaatcaattaaacctctttcttcatacattaccaagtctcaggtatgtcttcattagcagtgtgagaatggactaatacagtaaattggtaccagctagtggagtgctgctataaagatacctgaaaatgtggaagtgactttggaactgggtaacaggcagaggttggaacagtttggagggctcagaagaagacacaggaaaaaagtttgaaacttcctagagacttgttgaatggttttgattaaaacgctgatagtgatatggacaataaagtccaagctgaggtggtctcagacagagatgaggaacttcttgggaactggaacaaaggtgactcttgttatactctagaaaagagattggtggtattttgcccctgccctagagatctgcagaactttgaacttgagggaaatgatttagggcaactggtggaaaaaaaattctaagcagcaaagtgttcaagatgtgacttgggtactgttaaaaacactcagttttatgtatttacaaaggtatggtttggaattggaacttatgtttaaaagggaagcagagcataaaagtttggaaaatttgcagcctgatgatgcaatagaaaagaaaaatccattttctgaggagaaattcaagccagctgcagaaatgtgcataaacaatgaagagcaaaatgttaatccccaagacaatggcaaaaatgtctccagggcatgtcagagaccttcctggaagccccttccatcacaggactggaggcctaggaggaaaaaatgtttcctgggccaggcccagggctcccctgctgtgtgcggcctagagacttggtgccctgcatcccagccactccagccatggctaaagagggccaaggtacagctggggccatggcttcagagggtgcaagccccaaaccttggcagcttccatgtggtgttgagcctgcaggtgcacagaagtcaaggattgaggtttgggaaccttcgcctagatttcagaggatgtatgaaaatgcttggatgtccaggtgaaagtttgctgcagaagcagagccctcatggagaacctctgctagggaagtgttgaagggaaatgtggggttggaaccccgacacagagtccctactggggcactgcctaatggagctgtgagaagaagaccacaatcctccagaccccagaatggtagatccactaacagcttgcaccatgcacctagaaaagctgcagacactcaacgccagcctatgaaagcagccaggagtggggctgtaccctgcaaagccacaggggtggagcccaaggctatgggagttcagctcttgcatcagtgtgacctggatgtgagacatggatacaaaggagatcatttcagagcattaagatttggctgccctgctggattttgggcttgcatggggcctgtagcccctttgttttggccagtttctcccatttggaatgggtgtatttacccagtgcctgtacacccattatatctaggaagtaactaagcttgcttttgattttacaggcttataggtggaagggacttgccttgtctcagatgaaactttggacttggacttttgggttaatgctggaatgagttaagactttggggaactgttggaaggcatgattagttttgaaatgtgaggacatgagatttgggaggggtcgggtggaatgacatggtttggctcttcttcacccaaatatcaccttgaattttaataatccccacgtgttgggggaaggacccagtgggaggtaactgaatcatgggggtggattcttcccatgctgttctcatgatagtgaataagtctcacaagatctgatggttttagaaaggggagttcctctacacatgccctcttgcctgccgccatgtaagacatgccttttgccttctgccatgatttcaaggcctccccagctatgtggaactgtaagtcaattaaacctcatttttaaaaaaattacccagtctcaggtatgtctttatcagcagccaagaccagctcggtcgcggagatcctaacccagcagtgctagaggaattaaagacacacatagaaatatagaggtgtgaagtgggaaatcagggttctcacaggcttcagagctgagagccccaaacagagatttacccacatatttaataacagcaaaccagtcattagcattgtttctatagatattaaattaactaaaagtatcccttatgggaaaccaagggatgggccgaattaaaggaataggttgggctagttaactgcaacaggaacacgcccttaagatgcagattgctcatgctattgtttgtggcttaagaacgcctttaagcggttttccaccctgggtgggacaggtattccttgccctcattcctgtaaacccataaccttccagcttgggcattagggccattatgaacatgttacagtgctgcagagattttgtttatgaccagttttggggccagtttatggccagattttggggggcttgctcccaacagactaatacacccattttctggtatgtgactctaaagtccttagaatcttcaaagtgatgtctttttcaagctaataattgactgatgactggcagcccctaggcaacttcagaatgaggctggtcactgacccaggtaggattagagggttgggactttcagcctcacccctaatccctggggagggacctggagtttgaattaatcaccaatgaccaatgaatcaattaatggccaatgattgaatcaattaatggccaatgattaaatcaatcatatctatgtcatgaaccccaaaaggactgggtttgaagagctgaacccatggaagtttctggagtgtggtgcatctggggagggcatggaagctccacaccccttcccacatgccatgctctgtgcatctcttcatctgcatcctttgtaaagtcctttattacaaaccggtaagcctaagtatgtgtttccctgagtcctgagagctgtttgagcaaactaatccaacccaaacagggagtcatggaaacctcaatgtgaagccagtcataagaagctctggaggcccagacttgtgactggtgggaaggtggtggcaattttgtgggactgagccctctgctgatatgtccaggtagatagtgtcaggatggaattggaggacacctagctgatgtacggtgcagaactgattggctgctgggtgtgtgggagaaacccccccgcatcacatttggtcacagaagtgtgtctgtgttgatgattgttattgtggagtgagagcagaggaaaaacacagtttgagtttttccaaacagggtggaatcccatctgccaatttagaatctgaaacttatagtttcagtacttcaattaagattgaagtacttcaattcagtacttcaattaagattcagtacttcaattaagattcagtacttcaattaagattacagaactggtaagtgaaagtgatacaacaaaaatgtaaccaaagtctgctcaacttaacagctaataacaacaaagttcataaaaataataccagtcgatattgatagcactgattgagccctggctctgtgcatgaccttgttaagggctttaatcgcattaatctctgaataaatatcctcacaaccaccctgagatccaggtgtttgtaacaattctacagatgaggaaactgaggcccaggaggttgagtgtcttgcccaaggtcaaatacctggtacctattgtaaccaggatgataactggatgagtctaatccctgagttcttacccacattgctccccaggctctgaaggaatctcatccttctcattccgtgtatcattttacaccccccctccctcctaggaaaatatacaaggaaaggagtgagaggggccgagggtcactcacattttacagtcagcttgagggggtcgctcctgttggagctgactgggttggagacctcacactgatactccccagcgtcctcctgcctgatggggtctatggtgagcatatggttaaaccaggacagcttcatcctcttcgtgacctgcagacgctggttgttgaaaatccactggaaagaggttccagtgttatttgtgtggcaggtcaggaccacggagcccttctctgtgactgtggtgctgctggcttggatggagggctgagccactgactctgtggatagagtgaccaacagaaagtgtcttggggccatgctgcatcctcagagatctcagagtcaaatttagaacattctcctgtgaataaaggagaaagatgaaggacagggaggagcagagagaaccagagacacccatagcagcgagcagtagggactacagtgacctcagagaccccagggaccaggaggacccagctgcctcagaccaggaccagggagccctgaaaaccctcccacagatgagcggccccagagtcacatgagatgcaatacctggggtggctttaggagcaggcagtcagagaaatggaacatgggtctcagcccctaagggacaaggaagaggtgtggccagctcctcctaggatcctacatccaggacccagtctgtaaagaggttatgattattcctttcttttttcattaattccctccctccttcatcagagaactactgagtgtgtgtctcagttgggccttgtgcaggtacagggtgtagtgggaagagaaagctgagtcctttccttcatcctcccatgggagtgacatcaacaaatcaagaaattcatgatttcacgtccagtgagggaagaaatgtggatctgatgggagaggcttggacaatcctggcattgagtctgatagttgagacaggtgatttcgttctaagtaaaaactgactaattctccatttgcccgtcattcctcagaccagaatctccctctctgagctgaggatgcccaagaagaaaggagctgaaccaacatctggtcctggggtccacagatgccccacggtggtggccacgaccagattctgggctgcagacacacggtggtgtgacgttgagcactgacagcctgtgtgatgctgatgcaatttctctttaataaaatggggtaaatgtcaatggtccctggcttgccatcctctctgtaaattaacattaaaatatttacaattacctgacctaaagcttggcacagaatagctccaaataaacatcatctattattattttactccaaaaaaaaaaaaaaaagagttctctgggcctgattcctggtggagaaggagcggtccagagtgtcttttctctgctttccctcctcctgaggacagtgcacttcccgggacatcttttaagtttcccatccagtttaatggcctgggaagtttgtttgtctgtcctctccactctgactctcaggtgaaagatgaggctctgcccttgcccagatggggctctgggggctgagccctgcctggtgaccagctctaggaaccacggccctgggacagctggtaaatcgttgctcacaatcagccctgcccaggaagccacaacccagccctggcacaggctccccagggtcatctggagtcaggatcttgggacaggggcctggggcaggggcttgaagggctgagcttctctcagaggatcctcaggccaggccctgactgagtcctataagatctttctcaggtcatgtctatgaggaggaggccaagcggggttggactgagactgattttcccccgctgcatctcccgcatcagactatccttcttgctgtagggaatttccacggagtccggataagggaaaggaattctgatctgttatagtttgtctcccctgggtgtgtcctgcactaaatgcccaaaccccaacatgggacgtaatgcagagggggatgcaggcacagcccaggcctgacaatcctgcgtatgtgaagcagaactgacccccaacacccagaggcacggaggaatcactcaccgtatacacggagatggtgagatgcctgttcaatctgagaatttctgtatgtgacttgtagggtgtagtatcccgtgtcctctagggtgacgttctggaaatgcagatctccactgggtgatattgtctctcgaccgctgtatgcaggccctggagtcctaacgtgagtgtctattacatatgctgcgattagctggttgggctccaccgttttccctttgtaccagccatagctgtaaagattctcgggcagataaaccacagagagatgaacattctccccttcagcaacttcaaagggcgctgatgcaataaagagccaggcagtggtgggtgcgttccagaaagttaaaagtgaggctaggaaagggagagaatatcagtcaatatttgacctatgcattggcatggaaagacggggtcctgggtgcaggtctcttcacccctcagccttagagggtgtgtgtgtgtgtgtgtgtcctactgggtcaaagtcagcagcatgaccctcattccttcagtacctctgaccttggcatttccttgtgtgaaccctctttcccaggggtctgcatggttccctccccactgccttcagttcctactcacacaagggaatccctgggagacttctttcgtgaagcctcctctagagaccctgggtcttccctttctgacctttcccagctctgttccctccagggctcttgtcagcacctgacctcacattctagatctctttgggtgtctgtcttcccccccatgagattgtgagctctgtgagggcatggacttgagtgatgttagttgcaccccagtgcctgggacaggctgcagactcctgtggatgagttcatgagcgttcccagggccttccatatcctggggtttatttgctaatgtctgaggttggcagatgaagacagagtttcatgccctggtggtgtttttatttaaattgtcactgtgatatagttttactatcattttcaaaatgtagtggccactgacaatgaacttgaaaacatggaccaactgagattgttttgccccttggcaattccagttcacttagattttttggttctccttagacgctctctcccctgagtctctaacaaaagccctctgtctcctctcagagccccatcctccccaggagaccccagccagtctctgtgctccctcctcccacccactcccagggagtcctcccctcacctgtgagcaagagcccctgccaggggatgcattctctgtggggacaagctgaggggggccccatggtctctgctgcctgctctgtcctcctctgtggagaggagcttgggctccaggaacgctctagacagggttactgtgactgttgtctctgctgtccttccttcctctatgctgagcttcctctcaggcaggagcacttcccgtttatgggcaagggcggggctctgcctacaatgtctctctgtcccctcccctctcagtcctgcctcccttgtccctcctttctccttcctttttgcctatatttggttccctaggcaaaactttgagaagcaacgctgatggggtcctcataacaggacgacccactctccccagtactgacctctgctgtgttctggccttggttctgtcacagccggtagattatttccctttgtgacacacaaaaccagctgggccctgggtctcctcatgctctccagtgctccaggaaggcagaatgatgcccagcaggaaagtgacagaggtggctctgggggctagaaaggggctcactgggtgatggctgggaaggacccacccgctatcttcagtgtcaccagcctggcctctgacccagggacagagacccaggcctggaggtctcgggaggatccccagctcctaggtgtggagggaggtgtcctgtgtgtcctgggaagagaggactttgatggaaggaggtgggaggctctgggttctgctgtccttggtgaaggtttcagggggaccctctccatgtctggggtctgtgcccccagcttaactctcattctctttgcaaatacatatattttgtggatctgcagttgcctgaactgtctcatgtccctaaatctttgtatccctttttacagaaggtcaggaagggtgtgtacatgagtatgaggactatctgatcagggcgagtgtttgtttcccaaagatctctttagatatggtataatacataagataaatgtactgaattagcaattttaagtgtagaattaaatgatactaattctattcacaatgttgtacaaccatcaccataattttttaccagaaaatcttcattataccaaatggaaacttcatacttttaatcaataactccccacttccccctgccccacccactggtagcctctgatactatcaatctctgtgaatttgcctagtttacatgtctcatataataaggaattatatacgtgtattatttttttctggattatttctcttagggtaacacttttaagattcatccacgtcgtagcatatattacagcttctttcctatttatggctgagtaatatcccaatatatgtttatacctcaattttaattcattcatctcttaatggacatgtgggtggtttccacatttttgctattgtgaaaaccgctgcaatgaacttacacttggaagtatctgtttgggtttctgtgttcatttctttgggggtacatataggagtataaatatggggtcatgtggtagttctatgtttaagtttttgagaaacagccaaactgttttccagtttgctgtgctattttatattcccatcagcaatatacgagggttccattttctctacattcttgtaaacacttactatttaatattttttaaaacttatagccattctagtaggtgtgaagtgatagctcattgcagttttgattttcatttccctggtggctgatgaagttgagcattttttcatgtatttactgacaattttaatattttttagagaactatttattcaaatcatttgctgtttaaaaaaaatgggttatctttttattattcagttgtaatagttctttatatattttagatacaagtcccttatggggtacatgatttgcaaaatttttctcatattctgtgtcttctcactttcttcatggtgttctttgaagcacaaacatttttaactttgatgaagttcacttatctatttttaattttgttacttatgctcttgatgtcatattgaagaaaccattgcccaatccaagatcattaagttttactcctatatgttcttctaatggtttgataagttttgctattccatttaggtttttgaaacattttgagttaacttttgtatgggctgtgaggtaggggtctaactacactatctcgcatgtggttatccagttgttccagcacaatatgaagaggctaccattctttccccattgaggaatcttggcacccatgtcaaaaaccaatgggctgtaatggtgagggtttatttctggactcttgattctattccattgatctctatgtgcattcttgtgccagaagcacactgttttaatgattgtagtgttttagtaagttttcaaattaggaagtgagtcctccaatttttttttccagattgttttggccattctggggtgacttttaaaaaagatgtagttcaatggttctcaaagcaggagtggttcagctctccttttttggcagtctggagacctttttaggaccttaatctaagtagataaattattcccactttcttttctgagttgctatgttacagtgtatattgacacccatgaaataattgagagaccctggaagtgcttgcctacatagtgagggacaattagttccatgatcatgggcacagaagattttgttttgggaaacaattttgttggtggagttatattcatgcttactcttttatttgtcttcatagcctgcatctccttcagacttcatatctgtttattttcttgtttgtcctctggggtttgggtgttgggtgaccagtcagctggagctggaggaggtgcttagcaaggcagtgaccctggttgggaggagcagggctcagcagggtgaaagtagctgggccttgagtcaggagtggcatctggaaggcctgactgtaagggtcagaagggccagcaggtgggtgtcctaggcacaaacggtggctgctgctgtggactggaggaaggtaagaggccccgagtattccatgttcttactggctccccaactgaggattcctctcctgggctggtgctgtcctgcagcagggaggggttagacagggacggctgcacatcaggccggagtccatgtcatcctcttaggcactgtcactacagattgaggattctgttcataagccaagcctttgcacaaggaagggacccgggctctcaaggaagagcagctcctggtcagacctccatctccttctctctcattgcctgaggcctcaagcttggtctacctggcacaggggtctggatcctcctcccagggttggggtcttactgagctgggcacctgcaggtgggagaagatctggaggggccccatctgccttcaccagattgatgttgagggtccctgagtcctgcaccactatcaggtgctgagcaacttccagtgtcagtgacaaccaccccatggtggaagcagaaccacctcgtgagaaagcacctccaagcctcagtgcttgccatgtgtgggaatttgctggtttcagttgggggcatgttggtgggtggtcatgaattcagggccggattctatgctcacagtgcacatgctggatgtggtacagaccccaggcagggctcagtggggtggttttgggtgtgcacaggtatcttttctggaggagctggtggtgatttggctcccagaagttcctgagctctgcagactcaccaagcactcaatatttgagtgaacattgggcgagagagcagaaggtaagtgtcagggcatcggggttggtgcctctgggaagaggaggaacattctgggaacaaagctctcccccggcttacagggagcttcccatcgctcctgccttgaggatcagggaaactagggcctctgctcttccaggggctgcttgcaggcagtttgctctgggagggggtgacccaggagttgcctctcattttgcatttgagatttaaaaggagaagggacagtatatcttgccaggtcacaaaaattacaggcatcatattgactgaagggcactcctgtcatcactgcaatataccagaatggtcttttaaaaaaataagtgatttaggtttaccagcaactgtaatgcttgttttattcttctagttcaccgttaatgtcacttttgtagttttagcactggcaatgttgattttatgttgactctgatgattttaagctttcatttgttcacatagagatcatcttctttctgaatattaatgcattttttctctatttctactggttattcctgtacatagagtagagaatcacttttcccaaggaggtggaaagcttctgactaccaaaaaaaaaaaaaagtgtcaaaatgctttaaagtcagtaacttaaagatcaaatccaagagtgggcaacagattctgcccagggtctgaaaggtggagaggtgactggtgaggatgtttaaaagacctctcctctctactccctaaatgggggccatccagtgttcttgaggttcagagaaggcccagggctggggcagcagggcactgtcagctcccagctcccaggggccaggagtaagaccccaacactgtccagacactgattgcattcattttgggggagagtagattcttatttaaagaataatacaaaagtctacaaatatgaacataaacagaaattcctttgctacaattttccccttaataagacattccttcctaatgacatatgtgactgcattcatggctgagatgttttctaggatggtgagagcatcagagtggactatctggtgccttggggtcatgcattttcttcttccaatgtctacaggatcccccatgtcccactttgtagtgtaactcagtgtgtgtcattctggtttttgttgtatagatccttggaaagcccatgtcattcctgctgtgaggtacaggcagccaaatggcatcatctctaaacatgccttctcctggtacatcaaattatggaataaatgaaagccattttgacagatattgaagatataagtttctactcttcccacacatgcttctcccaagtgaaggattttactggtgaattgttattagagattagtgtggatcagtgactctgccaggggaaattttgccctctaggggacatttggcaaagtctggaaacattgttggttgtcagagctgggggagggagtcctgctggcattgagtgggtggatggtgctgaacaccctgcagttcacagagccccaccagtttgaccacccaaatgtcaatgctgaggagtggagagccctgctgtgccctcccgcagcttccctgaagcttcccctcacctgctcctcccatgtctccccaccacttccccacttcacccgcctccttacacctcagtcccctccacctgaactcaccccttagtccaaggccagccctgatctccgctctcctggtctccttgctccttagcaggaggcgcccactagatggcgcccttgcccttactggagctcaccgtctccctttccaccctgagacaaatgtggctgcttttactgccacaaccccagccctccacactctagatttgctcagggagcagctcctggacagacctcagggaccccagggaggagcctcactctggagattttgatggcatggtctttgaacttcactgttacccccagtcaggatccaggatgttgggagtgcatgattctgcccggtcccacttcagcaggaccccactgctgagttgtctgtggggacccgggcctctcatctccttcttgcattgcaggagagggatcttagcactgctttcacataaagtcagataatggaggagtgcaggtgagtttgggaaggtggacatgaagagaggttgtgtccctagaggtggcagcagtgagaggatgggcaggtgggaggaacacagcccatccagggttgccagccatattaggagcgacagcctttcctctaagcctccagcctttttcctgaaacattccagaactttccacttcagcacttcccactgaggctcctcaggtctgtccctgagctcccagctgagcctacctacccatctgaaatcctgagtcctgtgtcaccctcgttccccattattctgtgcagttctgtgggacgcccagctctcctgacacccccagtcttcagaatggccatcagcgctgtcgctgtggcaccagggtgactgccgcctggaggctgagtcctggcttcctgacagctgtggggcccgctctaggctcccttgtcctgatcattcatcacctccaggatgcacagcagctgggccagggggaggagcagggacaggtgtcagccaccctgtgtgtctgcaagtcaggctgggggtgtgggaggacgccaggaatgactgaactttctgatttagagggtgagagcttgcactgatggaatttgggatttaataggaaaagcatagcgttttcctattttgtaggcagggtggctggagtttggaatcatagattcccctgggatgtcactgtggacctcagtcccacccgttaggggcacagatttcagaatccacaccctggggcaaagcaggcatgggaggctccatcagcctggccagggctctctatttgtgcagctgctgcaaggagatgtgcactctgatgggaacagtgctccctcctccttggggggcagtatctagctccctgcagcccctctccctgcaggccctgccctctctgaacctcaccttccccaacccgccccccgcaatcccatctcagctgtaatcccaacactttctcatccattatgggtggactgcttgagcccaggggttcaagactatgctggctggacaatatagcgagttgttgtctctacaaaaagacaaaaattagctgtgcatggtggcatacacctgtagtcccagtcactcaggaggctgaggtgggaggattgcttgagctggggaggctgagttggcagtgagttgagattgtgccactgtatacttcagtgtaggtaacagagcgagaccctgtctcaaaaaataaaagtaaaaaaaaaaaaagaaatatggaatacattattgttaactctaatcaaccatgctatgcaatagtccaccagtaataccagtaatagccaataatgaattatctgaaaaagaatacaatttattcttagctatctactgctaaaatttttaagctatcttttatgatagctgaaacaaaagaagtaaatttaaccaaggaagtaaaagacctttataatgaaaactgtaaaacattgatgaaataaattgaaaaagacacacgcacaaatagaagatattccatgttcatgaattggaagaactgatattgctaaaatgtccttaccacccaaagtggtctacagattcaatgcaatttctgtcaaaacaccaatgatattcttcgaagaagtagaagatcctaaaattagaaaccacaaaaattcctaaaacctgcacaaaacaccctgagttgccaaagcaatcttaaacaaatagaacaaagctagtggcattacacttcctgacaatcaaagcatactgcaaagctatagtaaccaaatcagcatggtcctggcataaaaacaagcacatagatcaatgaaacagaataaaaatcccagaaataaacccatgcatctctagctaactgattttcagccaaggagccacatgcacacaatggggaaaggacagcctcttcaataagtggtgctggggaattggatattcatatgcagaagaatgaacctagaccctatccctcaccatgcacaaaaaattaactcaaaatgtattaaataaagacttaaatgtaagaactgaaactatgaaactactagaagaaaatatagggggaaaatccatgacattggtctaggcaaagagtttttggataaaatctcaacagcataagcaacaaaaccaaatataaacaaacgggatttcatcaaactaaaaagcttttatacagcaaagaaaaaaaaggccagcagagcaaagagacaacctacaaatgggaggagaatatatttgtaaatatatacatatatatttgtaaatatatacatctgataagaagataatatccaaaatatataagaaaattatgtttctgtatagttttatctgactgggatacagaggccacatccacagtcccatcctcaaaggccacttgttcccaaaatgtcaagcacatccctcaatgatccatcatcaacacctatgtctgtaggatgaagggtgaatcatgaagcactaaaaaggaagaaggaagccaatcccaaaacaaaatgatgcagggtctggaaagtccaaagcattttttttttttttttactgcatcttcctcctttcttctccacattcccaatcctcactattgattaacaaaacaaaaaaaactgggacccaccatcttccctactgtcaggagatctagcgagattgtttgagtcttagaccaaactttgccataagccaaatttctggctgactttacaatgatatgagctagcacagtctctttttctgccagtcaacttgtgctcggttttatttgcaaccaaatagaggtggtaaccaaatataggtgaccctaaaattagtcatcaggatgaaatcctaaaatgtgcaacaaactgggttgaattcaggattagtagcaacatctctgttgtgggcttgaaaagggggcacccttttatgcagtagcaaaattgctaaattgttgtttgctgagtctttggactctcatcccggattttctatgaccattcaaacagggctgcaatgaacatctatggttgtttagcttggcacacttctacatttctatatagtaatatctagaagtgcatttgctcaatcacaagatatgcacattttataattgactgctatcgaactaccttaaatagccttaatttgttctcaacattgtttaacagggtctgtttaatgtcctacgtccagcaaggacagtatcacttttcttaatatttttcaaattattggaccttaacaaatacttaatgtgcaattaattgattcctttgtattcccatgccttcttttatatgtttccttatagtacacaaaaccacattattgtttctttacttgtgtcattccaccctggaccattcctatctaaactataacattatgagagagagagagagagaaaacaatatgaaaatataaattgattaatcaaaaaaatttaaataggacaaatcaggaagacacaagagagattttaaaattattcagagaataccacaatagctgtaccaatatattttaaaacttagatgaaacggacaactatctcgataaatgtaaattaccaaaactgactcatgaaaaaatggatattatgaatagagcaataatcagtaaagcaattaaaaagacagttgataatttttatttactgacaacaataacaaaatttcaggtcctgatatttttatggtgaattttaacaaattttcaagctcctcctcaaccaattctcagaaggtttaaaactttaacaagaaaacactttctaacacattttcagaagctgttatagcatgataccaaaaccacacaagaaaattatagaccaatctcacttacaaatatacatgcaaaatcaaacaaaatcttagtgaaccaaattcagaattaataatagcaaacaagcaaaatatgttatcatacgtatggcttatatcaggaatgcaagtatgtttcaacatcagaaaatacttctccacattaacagactaaaggagaaaaacgcttgtttaattatctcaataggtttttagagaattttgaaaattttataaagttatgcgtattctgtaaaattgatgaaatccaaccttgatttatttttaaaaattgcctttcctatagaattataggtaaaggaaacacatgcatcctcacagagctacttcaaggctaagttacttcccataagtaacgtatcctgtaatgtgtgcttggcacatattcaatactaaacaaatatttgcaaatcctcaaaccacttctcgctcaaataacccacctttgtcttttgcctttatgttagggttgattttctcaattgtatcttggagatcctttggtgggtctttcagcaattaccctgaatttgcttttctgtttacaattttaattcctgggaactctttcttgttctctgactgcacccttttcatgagagttcagccatcaatcctccagaaccccaccccccccgcccccccaaaaagcaataaagatgtctaaaagcttccttctgggctttcgaatgatgtttaccccaggcatttgttctattcgttcatcacccattttccctacaacttgcctacacttgatatcagatttttatttattagtcacctatcttcttcattggcccattttcctattttgccactggttgttctcaaatgtgttatgattcctggttgtacagtcaagtggttgataatcttggatatacgataaagatttgctctgtagctgtgtgtaagcctatataaaagcttttgtatttttcttcttaaaaaagacaaaagatggttgggaagatccctccagttcaccagttcgaggctgcagtgagctatgatagcgccgctgctctagcctgtctgtctgtgaaaaacaaggggggcggggggcgggggggaagactggagatgtaaatctcccgcagggccctacccgtatccgcaacaggtctctaacaggaacagcctcaggcctgtgttggaacaaggtaggttacagaaatctggaagccagatctgtaacttcagggtaaggactggctctcagggctgatcccccgggctgggtgtcccagaggcacccgcccccgccccttccccaaggcaggccaggacaccttcactcctctccttaggctccccacccccttctcctccccactgtgcctcctggagtagcggtggcggtgccacaggggagcggggcggggcgggctctgagggcaagggggatgggccccgccggggtcactggcggccaccctggaaactcgacgcaggccggcccttctagtgaatcgtcccagccacagctggcctcccagccgcgcttggggcgcctcggggcgcgaatggtgcaggttggggagactcaccacgcaccgtcgggggtcggtccggttattcctcaccgctcggctccagtgggcgcgcgggcctctcctcctcagttcctgcgctgcagtccctccctcacccttcgcagcttgggaatccaactgtgtcattccgacggagcgccgtgaggacctccgagggtgttagcgccaagtgatctctgtccagcgctctgaatatccaagtaaaggagttcaatgaagggcgggtcaacggaggagaaaccgtgactctctcaagggagcccaaggcctccttgtctaattagtgacgcgccaatggatggaggctcttcccaccatctcttcccagcatccagtgacaccaccgccaagggacgggctcggcggaacctgcaggaaagaagcatcggctgagcctgactgcagcgctgtgaagagacaggggaggggatcagtagttggtcccgcgcccaccccctgtttccgcgaggggcggagttgactggccatgcaggcagagggcgaaatgtgaaattccactactcctaccgtttttccctgacccgatggggcggagtgtcgtcaggctaagttccctggcggtaaggtggggagattgaggcgcacacctgccgaacggtaacgcaggattagctaaggcgagctcaggacagaagcctcccgaggagcaggagggcaaaataataaataaataaataaataataaataactcactccttggtctttatttgcggcaggaattcagaaggtgaaagcggggccttaggatctttctgaccttttgggttttaagcaggaggtgtcagaaatgttaccacagggctagctggcttgtggccagcaagcgttcacaatgccctcgatttttcatccctctctgtgggttctttttttcattgtaaggcagaatttctacgattgctcacccactcagagaacctgagctggtttagaccaggtgagacaggctaggtttaccctggtgatgatgtgttgttgccatggcgatcctgcccagtaccagaggccctgcagattcagatgcttggtgcctgtgcttggctgaggggccaatgggtgaagctgccatctgcgggatgatgactgaagcctctaagtcagaatccgcccaggctgagccttagggcagctccatggagcctcggctggcctgggatagagagtccaccactgtgccagcccccagccactgcctaggtcctgtgctgagagccccttgtccagggaaatggcgtccagtggaaaagggaccacccccttgcccttcactcaaggcaggttggtgacaaccctgaagctaatccgttcctagaggagctgcttctgggtccgagttttctctgcagcagagcagctccctggatgggatctgttcaaagtccgcctttcacgcggaattttccgtccttgcaattttccacctccaccactaggggatcctctctgaccgcctcatgccggctctggcctctgagcaggggtttctcttctgcatgtgcgaccttgcgcatgcctagtggccttttgggacctagagctgctccacaccccgatggggttacagagtgcctcgcctccactccaccccaccagggttccttccctggctgggatgggatttcagaagcgccgaggaacagcccagacaggtgtgggagagtagccaaggcccctgtcccggggtggccaggacagcggtggcctcgcataggacctggctgggctgctgcaatcagtgtcctgccccttggagagcaacagtgaaaacaacaagactatcttcacccaccttaagaaagaacagaaccagtatccccaactctgctgtgtatcccaacccaattccattccccaccccactctcagtagccaatatgcaaaatattagaatactcttactgttattattttcaaccacactctgcatcctgaaaaaccatatatttcgttatgtgcttttaaacttcttgaaaatgaaatactgaggctgggcgcagtggctgacacctgtaatcccagcacttcgggaggcggaggcaggcggatcacgaggtcaggagatcgagaccatcctggctaacacagtgaaaccccatctctactaaaaatacaaaaaattagccgggcgtggtggcgggcgcctgtagtcccagctacttgggaggctgaggcaggagaacggcgtgaacccgggaggtggagcttgcactgagccgagatcgcgccactgcactccagcctgggcgacagcgccagactctgtctccaaaaaaaaaaagaaaaaagaaatactgaattttcaaatacttgctttttttttcggtcaaaattatgttctcaaatttcactcctgtagatgtgcgtggctggctgtagtttttgcatttttattattaggtattctcctgttgcattaatatgccacattttatttctctcatgtttttggtgaccacttggggtgttttttggttttgtatttttgctgtatacatgctgccatggtggacatacctctttatacatatttcctgttgtatgcagacacaattttaggatgtgacatcttcagcttttctattgtgtcgtgtgtcttttccttcgtgctttgtgttatttacatattctggacacagattctttgtcaactgtatgtgctgcacatctctttcccagtttgtgtcttcttcttcttttttttttcttaaaaaaaactttctttatagtgttttttttttctttctttctttgttttgttttgtttttttgagatggagtcttgctctgtcacctaggctgaagtgcactggccgatctcggctcactgcaacctccgtctcctgggttcaagtgattctcctgcctcagcttcccaagtagctgggattacaggtgcctgtcaccacacccagctaatttttgtatttttagtacagatggggtttcaccatgtttgtcaggctggtctcgaactcctgacctcaggtgatccaccctctttggcctcccaaagtgttgggattacaggcgtgagccacagcacctggcctgtgttctttcttaagtagatgttacttttaatataatagaatgtatcatattttgcttttatattagtactttttctatctaattcaaacacatccccaagggtctttgtgtgtagactgaccaatttctcaagaatcatgaatgaatactgcttctctttccccaatttatctgtaatgctacctttattataaagtttctatgcatgtgtagaaatagttcctgatttttcactctgtgccaccagcataccaatagcacgctgtcttaaatattaaatagcagagctttatgagacaacttgatgtgcagtaggcaattgcccccttgttactcttcttcagggttctttgttgtaccacatgaattttagaattggcttgtccagctaaaagacaactgcaaggattttatttggaagttcataattctatacataatttggggaaagtattttcataataccaagtcttcctattaatgaacacagactctctctctctctcccccacccccacctgtttagttatttatatctttatggtctgttagttattgtttattgtctttcaaccaggtttcatgtttttctacatagaggccttgcatgtgaaagtctttcttcctagcttgctattacaaattttttttaattgcactttttgggtacagtggcttgtactgtaatccccgatacctgggaggctgaggcagatggattgcttgagtccagaagttcaagaccagcctgggcaacataatgaggtccctgtctcaaaaagtttgttttaaaaattgcatttgctgttattcaacaaatgtcattgtgtctcatatatggatttttatatctgataaccttgttcaacaatcttttgattctaacaatatatcagattcttttgagttttccatatagacaataatgtcatctgtaaattataattgtttcttctttgttatttcttggaccttttattttatatttttgtcttgctgcaaggcaatatccctctatatattgtggggtcttttttctcataaagtggggatggtgaacacccttgtcttgctctctgattgtataaagcatgctttctgtagcattttgtagacgctcttttttagattgaggtaattcacttttatttctggtttactgagtttttagcataaattcaggctgaatttgagctaaagctttttctggagacatcatttgaaaaattcatatgatttactttctttaagtcaccaaagttatgatttacattgaactgagtttctactgtttaactgtattcttgggagaaaacccacttgtcactgaacaatatctgttttatttactgctgtcttgtgtctaaattttcttttaggattttttgtatatgctcagattagcctgttattctcctttctgtatttttttctggtttgggggtcaaagttataatagcctcacaataagagctaagaaaccagccctaatggaggccggggcaggaggtttggagttcaagaccagtctgggcaaaatagtgagacccccatctctatgaaaaatagaaattagccaggcatggcagtgagtacctgtagtcctaggtacttgggagggtgaggcaggaggattgcttgagcctaggaatttgaggctgcagcgaactatgattgtgccactgtactccagcctggatgacagagcgagaccctgtctcaaaagaaaaaaaaagaagaaataaaaaggaaaagataaaagagctaagcatctgtttccttttttccattttctgggagagtatgtgtaagactgtaattaactgtttcttgaataatgggagaactctgtaaaataatctggctttggtgttacctgtattggaaggatgaaaaataccaattcagtttcattattggttgatagggctactcatgctttttgttttgttttgttttgttttgtttttgagaggaagtctctctgtattgccctgttgtccaggctgagatgcaacgttgttcacaggcctgatcctggctcactacagcttctaacttccgatctcaatagatcctcccgcctcagccttcccagtagctaggactacaagcatgcagcatcacatccagcctcttttcctgcctgacccagttctggtttcctttagttttctaggtgttcatccattttatctaatgtttaatgcatttggcataagggtgctcagtgtcctttcattgtctgttgtctgtaactgttgccattttcattcctatttatgagtactggcgtcttctctcactttttcttaataatcctgctggaactttgctttttaaagaacatcttttgacttgttgattcttttttcatacatattaactattttcttattttttgcctttatatttatttcttttcctgtttgaaacattgctcttttcttactataaaaatgggtaagtagctcatgaattaccacctcttttaaaaatcttttctactgtaagcattttagcagtttacatttgcccacaagtaccacttcagctacaccctatgtgcttttacataaagtcttcatttttggtaagacatattctcaaattttaattatcacttgtttttaaatccatgatgttttatttgaaatgttgtttctaaagatacattttctggttatacttttattcttctaatttagcacagtggccacaaaacatggtctgtgcagtgcatacaatcgatgagtaatttctgagctgtagtatttggcataatatatggcaaaatttcctaagttttccatgtgtgctttaaaaaacttccagtaaaatacataaatctgttagatcaagcttctcacattgttcaaatagtctatatgtttactgattcatttgactgcttgatttatcaattacaggtaggaatgtattcaaatctcctattaaagtgtgacactcaagtggctttttaaagacagagatgccaaaccaatgaatacatgattttccccaaagcctgcacaaattctctaatgaaattttaccatgaaagtttgtttaattaaggcttactaaagcagtatgttgtcttttactttttaaacagagaatatatattttaatacatcgtttaagtttatgattaattatctattactgaggataagaatctttgcctgtgctcattcagcatttgcacttcatttatgatctgccttctcatagcttctgttaatttttatactagagacatttatttgtttgtataaatgttgaaggtttttttttgttgttgttgtttttgagtcagagcctcgctctgtcacccaggctggagtgcagtggcatgatctcggctcactgcagcctccatctcctgggttaaagtgattctcctgcctcagcctccagagtagctgggactacaggcatgtgccaccaagcaaggctaatattttgtatttttagtagagatggggtttcgtcctgttagccagggtggtctcgatctcctgacctcatgatctacctgcctcggcctcccaaagtgctaggattacaggtgtgagccaccgtgcccagctgggttttttatattataaggagatgtaatagatagatagatgtttcaaagatagtcaaatgtttttaaaatttaaaacacttttttacaggttgactttcaccatttaatttcatctatgtgttttgccttagagaaattttaaatgctatgtagatctcatgacttataattatgaagcattttgttttctgttttccacgaaacttagcttaactttgagcatataatagttgtaaaggtaggagagtaacactgaaaaaaggaattgcataaaaatggcacattttctgtagagttgtttatcgcctgaaaataggccccatttcatggaagtaagatgatcaggctcaggtccccagacgaaactcttggcatggtttttggagatagtccagggctcagtactggctctatcatttgctacttctcccaaagtaaccaatatctcatccaccctgagcccatttccatatctctaacatgaggataatagcatctaccttacacaccaagtagagggatcaaatgtaggaactaaatcaaagtaccagcactgaataacctacatcctcccacttcccaaaaggaagagagatgtatcccctgttgacaaacgagaccattttgcaggagagaaaggaaatgccagttcacttgcaatgtaaacatgctctctctttttagggatgtccagggacctgagagagaacccatgcttaccaaagagtttctagttccagacacacaggactcgaagggtgacaagtatggttttcagggtccctgaatccacccagtcctcacagaaactcctaaaagctgtcgattgacagcgttgagttcacagctctggtcctcacatgctgatactgcttgtgatatcgaacccgacaggaccccacatcacaattgatttaccaactacaatataatacctcctgaatctccaaattggctcacccaggaacaaaggcttggggtaaaactggattaggagatataagctctgaattttctgagggtgagacacacaaggattctaagtgacacgccacagagtaacgggtctgtgactggaggacccacagatttgtcttactggagacaccacatgcacacaaactccatccttagctgtggaaacaagggtcttttgctatcttagccgaattctgggagtaatttttggaggggaggagatctttgggattgcctctttcaggccctttacaaaaatacctacttcttaaatggtaaagcttacactaaactgaaaaaattacatccttggctttttatgaagtaggtgttggattgaatcactactggaagaagtatggcatcgcaaattctaagcagtggtcaaaggatggatctgttaaattagaaaaatctctaaatttataaaaagattttagattcctttattctaaacaattgacctatttgtactcatgggacaatcaaatttcaaaggagatatgtaacgatttcatggcttgcattaaaaatccttctgataaaattaaagataaaaaatctgaccccctgccaaaaaaatcttttgaagttcatactgcctgctttcaatattctgtgggattcacaatgaaaggtgccttatattgtggcctagcttcaagtttatgccttcgccaccatggcctgggttcaattcccagtcagggccccagcgcctttggtttaatgtttgcgtggcatttgacttttttacctatttagtattggtgagattacctttggtaaaaaaaagtttaaagagtggaaatcgcaattctttgtgttggctaaaatctgattataagagatctggaaggttttatttttctttttcaaagagctctatggtcagaagtcggcttcatgaaaagctaatatttaattatatgtacatacagtctttctggattttctcttttgcctcctgttttgaaaaatatttggatttgagtgaaactccgttttagaaattaattgcttggtacaatatacccatgtaactaccctgcacatgtaccccctgaatctataataagagttgaaattttgacaaaataaaattagattttgaattaaaacaaataggtgcttggttcctctgctcacttctttttaaaaggaattcctctcccatgtacttcttcttttcccttctttaccttccttttggcatctttggtatcacatgaagggatctagagggaattttaagtgactctgaaattccttgagaaatacacaaaaagatcccactcaccccttttgggggtctcctgttctccttgtggagtccagagtcagggacaggctcctccaggtctgcagctctgctctcttttatttcatcttggctgattgctttggttttgtgagtaccaggcattactttgtactgtgagagacacgtcctttgtgagtgcaacggctgctgggtcactggtgagggctgcagtttggagatggctgagagccgttgcaataaatggttgtgattgcagggggctccttgtttctttgcaagtttagatgagaaaggtgcagtttggacacagtttaaaggctgtgaaaacaccaccaatgaatatgatttcctttggggatggtctgattaaaagtgggctgattgttgctgtgctactagccttgaagacatgtttctacagcattgtgcagtgtggaaaaattgtgtggcttggtcttgtggcatgtcccttcttttagagacctcagattcaatgtgaaattcgggatttttgattttcaaagatctagatgccctgccttccagatgtgcctactcttcacatattttaaaattagatcctataaactgcaaatactttgttggcttctgtgagatcagaggtccagttagaaaaggaagacagtttgttaaaattaaaaactatttatctaatctaactagattggcctccaaatatgactttctgacattcagctggttactctgaaaagatttctaaatctcttgaggctcatctatatgtttccttgcaaagaaaaaaaaaaaaaaaaaaaagcaagcccaagcactagtaagaaaaagatttgcaatgtttcatgaaaggagtagatgagtgaagcatttatttgtagatactgggttggatacctgtgcaaagaagaagaggtcaataataaaaattgccaggggatttcttggaacttaacaagctgaattaaatatagaaatgtcaggaaatcaaggcaggaaatactcacttgtggttaggcagacagggcagggttctgagcttgagatggagcaaacagttgtggtgggtgaagttcacatgctttagagctcagctgtcctagtaaagaagcctaagagtctctaaagctcttatgagaagatggattttttttgcctagattaaaaggttaaagaattgctttaagttggataaaataaagctaaatgtttaagcaagttgtgaaaggtttatgaaaaaattaattaaaatatttttgtgtgtaaacatattgactaaagttgaaggggtataattcagcatttctgtaaattgagcattgaaataaaaacacaatgggtttctcttagagcactaacctgctctttaacaaaaattgtaaagggttatagaaagtctataaaaatgttaccttatggtcaaacattaaaattgggtaaatatgtctatcaggttttattaagaattaggtttaacattaatagtacactaatgtaaaggtgaaatttggcttatttggtacaaaaatcatacaggaagcattgtgaaatataaaatgatttttagctttctttgggctatatttctataaatatgttattgatgagggttccaaagttatgggagactcctataattctgctatatctcagtgtacattatcagtcataattataattgtcatgttaaattattgtgggccacagaggtaacagatttccttgtcaattgtgtctttgactatgactaccctaaaacgttcagtcacccatatacacatgttaccttgttttggccctctttagaaggtaattttataatcagctataaagccctaacaggtgctcttaaatgcaaattttgataactttggagattgtgacatcagaagagaggaaaaatgttcgggacacttggagagctaaaatgttcattgatatcaagcaggacaggaattaactgcatgaagtgaactaataggaggctgaagtgatctttttgactttttgcttaaaacgttgctgatcctttgttttgcttttcagagtcaaggcaaattttcttttgagctattgacagcttttaacgattaatcaaaatatactcctatgaacaccatttggagcattatttgtttctctctacccgatttccccagaatttggaaactatttgtgggtattcttaatttatggcaatatagttatttgcataagtgcaataagaatgtgttttctttggtaacaggacacaatttgaaaaactggttattttaccaaggttttgaccagaatgctgtgctttcctttaaggaatcaaacttgacttgtggagctaataaagcctttggaaaactgaccttatatcctgtgaacacagtccctgtacagggttactgatctgtgggaagaaaagaatgtcacattctgacaggtcaggaatcccaagttatcttgaaacttcaagaggacaggaattcacccaaccatatgtatttgatggtagaaatccatggcaggggctcagctttaaaaagtcttatctcagattccttctataaaacaaagtcccattaaaaccaattttaaaagcctatgtgaaaaataattattcttgctgcacctcgtacaaataaagtggcaaagcataataaagcaaattggtcctgtcgtaatttgtctttagtaaaaacgggaaactggggtcgggtgcagtggctcactcctgtaatcccagcactttgggaggctgaggtgggcagatcatctgaggtcaggagttcaagaccagcctggccaacatggtgaaaccccatctctacaaaaatacaaaaatgagccgggcatgatggcgggtgcctgtaatcccagctactcaaggggctgaggcagggaagcggaggttacagtgagtcaagatcgtgccacttcacgacagcctgggtgacagagcaagactccatctcaacaacaacaacaaaaaagggtaactggagagagggaagttatgtttcaaaaacttttggaaactatagtacacctgtttttaaattctagtctggcattcagtttttattattttctacagtttgggttaaattcgtatttctctggctacaagtctcctaaataatcttttcatttgtttcctttttctttccctttttccccatttttcttaattggaaatcactgaaacctaagctgtgctttcttaaagccctgtgaactgaagactagacaaccgaaacttctgaaggaagtagcagcaacctatttatatgtgttgctgttgcctactattatgttttagcaggtgctgcctctacacccccgaaacagagagtgctactgggaacaaatcgactttttccactccagtgctgcattcggtgccccataacgatgaccccctctcagcaggaagtagccagaaagattacaatgctccatctccctatgattcttgtgataaataaatatacaagcatgatagaaatcatgcgcaaattgacagtggggattgtggcaggccagatttcactaatggaggtccccatcacaactacttcagtactgactgagtggttaagttcagtatcaaaagctgaaagtgccagcgcctttctacaaaggctagaatgtaacaaaagcccaccaagggttttacctaggcctttcctgggccttacagcatgacaaaacaaagaaggaattcttaaccagacctgtttaggattaaacaaatttaattgggggtctgaagaaactcgccaggcctccacaaacaagttcattgggggtctaaaggaaccccccccaaacctctgtgattgagcaggagacaaggtcagggtaattgccccagcacctggactcatttagatttaagtaaatgtactgaggctccagagaaaggtctccaagacttagactagagttacagattaaaagaagttaatcacttatatctttagataaatgcacactgacacgtagacatacatcttagaaaatatataagctctggaaaaccttgtaatttacagttggtctggagatattttctgggccttctctctgtaaccggttccagaaataaaaaactctcttcctccccagtttatctgcatctcgttattgggccgtgagaaatagcagccagaccctgagtttggtctgggaacacactggctgggcttcctgcctggcggtagagcttcactgtcctccttcccagccaaaatgtggcccttgaaggcttcctccccaactgaccggttttgggttctaggtactcagggaacaccgtcttcaaggaggccattttcatactgttcctggtttgatttttctgaaattaggaaatgccccttgaggcatccaggattgtctttatttcccctgaagcttcccctcctgaagaaaaaagttctcaaacaccctcaggactcaaaccccaagttcaccctgtgaaacattcccatttcctaaacccaggcaggctcatggccctcagcctctcagaccccatggaaacctcctcccccacttcacgggttctctccatattgagagcctcccctcctcggcacacaacccagagactcaccccaacatgtgtagcaaatcaccctggaaacaatcatggctgaacgtggtagcccatgcctgtaatcccagcactttgggaggcccaggaggtggatcacctgaggtcgggagttcgagaccagcgaggccaacatggtgaaacctcgactctactaaaaatacaaagttcactgggcattgtggtgtgtacctgtaatctcaactactcaggaggctgaggcaggagaatcacttaaacctgggagacagagattgcagagagccaagatcgcaccattacactccagcctgggcaagaagagtgaaactacatctaaaaaaaaaaaaaaaaaaaggaaaaggaaaagaaaaaaaaaatcatgaggcaacattgcatttaacaatattttatttatcaaaagacacttgtctttctcaggtaagtgaaggtctagagatgaaacgagtcccgatgtaaattgccccatgggcattgctgagatcacaagatcatcactgcagcatgcagcacaatagtaaatttctcaggatggaagttcaacaatccaaaaggtagtattttttttcatgatgctcagtccatcatacgaaataaaaataaattccttttcatgatcatccattcagtagaaaaaatgatagtaaatttgttctcatgaagatttttaccgtaacatataggatttatcgttattattattattctttgttttttgtttttttgaagcggagtctcactctgttacccagtctggagtgcagtcgtgcgatctgggcacactattaacctccacctccagggttcaagcatttctcctgcctcagcttcccgagtagctgggattacaggcatgcgccaccacacccggctaattttcgtatttttactagagatggggtttcaccgcattggtcgagctggatttgagctccggacctcgggtcatccgcccatctcagcctcccaaagtgctgggattacaggcgtgagccaccgcgcccggcctcaatttatcattattcacgcatccacaaactgggttcttatattttgtacgtgattttttccattgaggagagatatctgtgcatattcatgctgctcatatttcatccacaaactcggttcatatttcatccacaaacataattttttccgttgagaagagatacttgtacatatttatgctgttcaaattcacatttcatcattcttttacaagaaatagataatgtattttaaggttttccagtggtattacagatattttactgggtgtatagatagaaattaaaccaaacttctttgttctggccgccagtcatgcatcctgttttcaacatagttcacatacaactggttgtgtaaaaatgaaattattttgtttagtacaatcatcaacagttggttgattagatttttaattatcaagttaatcattgtcattatgcttctcatcgcactcgtcattaattgctgtgggaggaaatttgttatgttccctatgagagggtgtatcacaaattcaaataagaattcaacgacaatggactgtataaaggaaataagcaagtccatggaaaacatatttttttccggaaaggattaaaatatttttaaaaaggaattaaaaaaaaattgggcacggtggcaaatgcctagagtcccagctgctcaggagatggagacagaaggattgcttgagcccaggaataagttggaggctgtagtgaacagtgattccaccactgtactccagccagggcaatagagggaaaccctctttctaaaaagacaaaaagaaacaaaacaaaacaaaaaaacaccacatcaaaaaacccaacaacaaaatgaaaaaccaaataacagcaatacaattggagctattcgatccaaagaagtaaatgaaacataaagcaaataaaagagaaaagctaatacctgtgtcctgcaggactcagtccaagttctgctctgactccctcctggtgagccaccccttaaaaagtcacttggggcggggttactttgacagacagtcttctgtcaaagagggaggcggtaaatagcacttttttttttttaatttaacgcctttccaacaaattagcggctatgttgtctaagagtgcaaatgtcagaggtgggtacaggcagcaagaccctccccacaggggcagcagaaggaggaatgactaagggaacaagactttagtgtgctcaactacacaggacaggaaacagatgctttttacaaaagctggtggacttgaaggcagaatattttcaagttcctgtaactgcgaactatgacctgtagcctgtgagagtgactttctgtggcaaaggagcttttgtgaatgtgaggaagttaattatcttaacagtgggaggttctcccggcttatctagctagaccctcgtgaaatcccaagtgtccttaggaaggggaagcagagagagatttgagtccagaagaggaagaaggtgatgtgaggcccagtaggggaacaaagggcgatggcatgtaaacacttagcccccagaagtgggagagggctggggttcatcacaccagaatccctaacaatcagccttattttaattacccttgaaatggaaggaggccttagagagccagaggcttggaggggcaccctctgctgcatacacagatcccaactgctgtgggctccaaataattgcaccagggaaatcacaaattatcaaaaataaaggatgtaaagcttttaaaaaatattaaaagcccaacaaataaaaaaagttctaaatctataaaattgacctcagtctgtatatttagatgagtcatgtgtatatagcgtttcacttcaaaatatatgataaatctctcattcattggcttaaaaataaacacttcaatcaagtctttatcagaaaaattgaaacgttaactcaattgccttttagttcatgtgactttacaaaacttaaaacaataaagtcagttttaaaaattattagtaaagtaaaagaaaaatatcttcacaatgtagacattttgtccacatgagacatgtgaaatattgccattactaaatatttgcaggtcaaaaactgtttccaaaacattttaaataatcatctggcctgtctgttttagagcattcaattctagctgaggtctggggacatgtgaaaggagccacggcccgactccgtgctgggaagagtcagacattttccacagctctgtcctttgctgtgggctctgcaactcctaccaattaaaattgcttacgtttttgttttatttttactaaagaggggttcctaaaagctaacattatactgagtatatgtaactaaaactactaagaaaacaatttcacaattatacaaatgtgccaagtaaatgaaaaaataaactgtattttaataaaggttataaaaagaaaaacatatagtggtgtgaggactgtctcaggtcttcactgagcaagggatcatgacattctatggcggacagctgaccttggctttctgctcctcttgattatgtctactaagtgacatacttactctttttccacctgtcttgcctctaagggtaacaggttttatgagatccctcctagtgctttgcaggtcagcctccctttgctgcattccaattttactgcctataccctccagctggcttttgatgacaaaagtcctggtcccagccattctcagattctgtcatccccgtgggcactatggagctcagcactatgggaggttccccaaaaatctcgttttctatgaggaatggccaccacctgcatctcagtgatgctagtgacccctttcctactcctgtgctcactggtcctcatgaagatcctggttggtctgtagccccctatttttcctattaaagagaaattacagtaagacccatttgtgtgcaaaatcaattttaggcttattacacttggcctgataatttgcataaaatgcagcaagaattcatcggccatataggctacttttgagttaattttcctgggtttttacctaaaaatatactattttggttagagtcttgtgaaaataaccaatgtgttcaattgttttattttaaaaggctcttactgaacactataaatatgtataagttgaatatacaaactatattgtcataaaatcacaacccaaaatgtggagaacgcagagggaaaggtaaatttgctcgcaaaaacatacttcacccaaataactggaaaaaaaaaaagactttcatgacccttctttaaccagagcagcagctttcaaacaaggtgtttgccttggaaatgccattcacaagccaaacggcccttgagagctgtctgtcaggcactgtagaatctagcagctcctcacagagttagaaatagtttcaggaaagagattccctgcttttagtaactgcactttatattcccagatagcgagattgtatgtaaaccatttttatcttattctggaactcttttgggtactttttttttttttttttaaatgatggagtctggctctgttgctcaggctggggtgtagtggtgcgatttcagggtatgagaaaatgcagctggacctggctctttccaggaagaccctcacagccaaggagtccaaagcctggggttttcatctaattccagtgtgactggggtaggagcagctttggtgctgggtgtgtgtgtgtgtgtgtgtgtgtgtgtgtgtgtctatgcctgtgtctgtttagggtgttaggctcgtggttgtctagatacaaatgtcccagggctcaggagccccagggttatgtcaggggcaccagatgaaggtgtcaacagaagttagggcacaagggacaaaggtgagagcaaggttagattcatttaggtgcaagaaatcatagagggaggagggagaggaagccctcctgctaccaccgaggaagaagcgcagcttaaggcagaaagcctgtccggagaggaagtgagtttgagggcagggctctctgggtaaagtacggtctgggacaccagcctgggggaagggtacagaatgcagagtggcctggcgtggggactaagaacagaggagagcagctttcactgggagggtcagtgttttcagtgtccagcactgagcaaggtgagatttgggcagcttgctgtgaaataaggtcaggctctggcattgtccccattgcgtgtgtgtgtgaggggcactttgggagagtgaactctccacctccatcctctcatacgtccttcaaccgagcttgccagttaccctgattccaaggagatctatttattgttgacaatactggatcctagcagaggctgggtaggagcctgggcacaagcaagtggaggagggggcctgggcctgaaagacctgggaggtttgagagaggacacagcccacagaatggagcagatggggtagagtcggcaagcattcagggctcctagtaagttggacaatggagaccctgaaagatccagtaaaacggggagaacaaacaggtccccaactcacatccttgcagtgcctggagcttcagactccagacaggtggggaaggaaaattgagggatgtgaacatgttggagaatgtcgtgccctgaagaatgaagaaaaggggggtgaggaatgagagcaggaacggcttccagtgcctggtgcccaggagaactcagaaaatgggtgtggtggagaggaatcgaggaaccggaagtggtggaagtgtgcagggcccctccgagatcactgtgactgccaggcgtcctccctggctggagagcttcactgtcctccttcccagccaaaatgtgtcccttgaaagcttcctccccaatggactggttctgggtcctatatatttgaaggggtggcctgcctctccacacctgtgggtatttctagttgggtgggaggagagacagagaaaagaaataagacacagagacaaagtataaagaaacaacagtgggtccaggggaccagcactcagcacaccaagggcctgcaccggcaccggcctctgagtttcctcagtttttattgattattattttcattatttcagcaaaaaggaatgtagtaggagagcagggtgataataaggagaaggtcaatgaaaaacatgtgagcaaaagaatctatatcataattaagttcaagggaaagtactatgcctggacgtgcactcaggccagatttatgtttctctccacccaaacatctcagtggagtaaagaataacaaggcagtattactgcaaacatgtctcacctcccgccacagggcagcttttctcctatctcagagttgaacaaatgtacaattgggttttacaccgagacattcagttctgaggggcaagcaggagacagtggccttcctccatctcgactgcaagaggctttcctcttttactaatccacctcagcacagaccctttatgggtgttgggctgggggacagtcaggtccttctcatcccatgaggccatatttcagactatcacatggggagaaaccttggacaataccccgctttcaagggcagaggtccctgcggctttccacagtgtattgtgcccctggtttattgagactagagaatggcaatgacctttaccaagtatactgcttgtaaatattttgttaacaaggcacatcctgcacagccctaggtcccttaaaccttgatttcatacaacacatgtttttgtgagctccaagttgggtcaaagtggctgggtcaaagtggctggggcaaagctacaaattaacaacatctcagcaaagccattgttcaaagtacaggtctttttcaaaatggagtctcttatgtctttcctttctacatggacacagtgacagtctgatctctctttcctttccctacatatattcatggaccacagtcttcaaggagtccatttcctcactgtttttggtttgatttctctgaaattaggaaatgccccattgaggcacccaggattgtctttacttcccccagagcttccactcctgaggcaggagcttctcaaacaccccccaagactcaacacctaatttcaccctctgaaaccttcccatttcttaaatccaggcagggtcatggtccttagcccctcagatgctgtggagaccttctttccctttcatacattctctcaagattaaaagccacccctcctcagcacacaccccagagactcaccccaacatgcattgcaaatcaccctggaaacagtcataagaccacactcatttaataatattttatttatcaaaagacactctttctcaggtaagtgaagttctggagaggaaaagaggagtcctgatgtaaattgccctgcaggccttgctgagatcacaaggagattgttactgcagcttgtagcacaatagtaaatttcttctctggatggaagttcaacaatccagatcgtagtatattccttttcattatgctcagtccagcaaatgtgatgataacaaattccttttcatgatcatccattcagcagagaaaatgtttgtaaatgtgttttcatgaagatgtttaccataacatacaggatttaccattatcaatgcatccacaaactctgctgttgttttttatacataattttttccatcgagaagtgatagttgtacatattcatgctgttcatatttcaaccacaaactctgctggtttttttatacgtaattttttccattgagaagtgatacttgtacatatttgtgctgttcatatttcatgtttcatcatccttttacaataaataggttatattgtattttaagtttttctaactgtagtgcagaaattgtactgggtgtatacatagatatcaaaccaaatttacttgttctggctgataatgcatcatttatttcatagattatgtatttctttgacacatttcacgtacaactaattgcataaaaatgaattttcttttagtatagacatcagcatgtgcttaattcggaatttaattgttgagttaaacatcgtcattgccttttccgttgttattaattgctctggtgggaattttgttatctcatacataagacagtgtgccacaatatctcttaaaatttcaatggcaataaactttatatttaaaaacagggaatctatggaaaacacatttttttctaaaggattaaaatatttttttaaaataattttctaaaaagttaggcacggtagcaaacgtctagagtcccagctactcaggaggctgagacaggaggattgcttaagcctacgagttgggggctgcagtgaactgtgattgcaccactacattccagccagggcaatagaagttaaccctttttctaaaaaaaaaaaaaaaagaaagaaagaaagaaaaaaagcaacaacaccaaaacctcaccaacaaaatggtaaagaaaaaaaaaacagcaatacaatgtaagctatttgatccaaagaagtcaatgaaatttaaaacaaatgaaagggaaaaagtaatacttgagtcctgcaggactcagtccaagttctgctgtgcctccctcacggtgagccacccctttagaagtcacttgggtcataagttaacccgataggaagtgtcctggccaatgaactagggaggtggtaaatggcaccattttaaatttaaattcacggccttttcaacggatcagtagccatgttgggtaagagtgcaaatgtcagaggtgaaaagaggcagcaggaccctcccctagtgcttgggcaacagaaggtggaatcactaaggggacaagactttagcatgctcaagtacacaggacagaaaacatgctttttacaaaagctggtaaatatgaagagggaacattttcaagttcctgtaaccaagaactaccgcctgtaaccggtgaaagtgactttctatggcaaaagcgtttttgaaaaggtgaggaagttaaatatcttaatgttgggaggttcttctggtttatctggctagaccctaatggaatcccaagtgtccttatggagcggggagcagagagagagatttgagtccagacgaggaagaaggtgatgtgagtctgggtgcgggacagggggagaatgatgctatgtggggatctgggctggggaatgacttagctgcatgagcggagtgacttagactcctgaactagaagaaatctagggctcatcacctcagcagccctaaccatcaaccttatttttattacaggtcttccatcgacggactccctaaaaagccagcggcgtggaggggcgccctctattggacaaatagatcttgactactttcggccctcaaatagcctgactaggcaaataacaaataataataatttttttttaaatcatggaaaatattttaaaaaacaattaaaaagttataaatctataaaatctgcttctgtctgtgtgtctgtatatttagatgtctcatgtgtacataatgtttcactaccaaaatatatgatgaaaccctcattaatcggcttagaaaactaaacacctaaatattttctcagaaaatacaaaaactttaactcaaatcccttttaattcacctgactttaaaaatctttaaaaaataaagcatgctttaaaattattagtaaagtaaaattagaacatcttcagaatttagacatttggtttaaattatacaggtcaaatactgcccttagtaaatattttcaggtcataaacaactcctgtaatcttttaaataattgaattacatgtctgttttagagctttaagttctagctaaagcctggggacaaatgaagggcaccatgccccctctctgtgctggaaagagacattttctacagctctgacccttgcagtaggctttgcaactgctacctatcaaaattgcctacatcctaagtttattattaaaaggagttgcttggagttaacattataatgaatatatgtaactaaaactatttctcatacaaagtatatgaaaaagtagaatgtatttttaataaaaagttataaaaagacatgaacatgtagtttttataaaaaacagtaattttgtctagttttgcagttctaaaaagttatgttaaattcaaaaataaaaaataacaagacaagactcaaggtttaaataagttgtaaaagatttgtaaaaattagttctataaaaattttacaaaaaaaagcattggttaaaatttaaggaattattttgtttttacagaaattaaacattcattaaaaacactctgatacaaggccttaatttgggttcatgtatcagaatagcagggttttcttagaatattaatctattctttaaaagaactatgaatgttatgcaaactttataaaaatcttaccttagagtcaaactgattaaaattccatagattttacgtaaaattttattaaaaattaacttcaacaaaaataaaatttgattttctcctttaaacaaaagttttgcgtaatattaaataataaagcatttttgtttaccttttaaactataaacacacacacacatacacatacaccaacactaaagtcagctgacctcatactgtctttattggatattcttgtttaaaaaactatcttctttggaaaataaagttttttattttaaaccatattttaaattatcattttgactaaatccataacatacagtgatctgtaataattctattttataatatcaagtgttttgaagaactccaggaacagccatgagagaacactgtggtttagtaacactttatttcctcagtttgaaaatagttgtctttcttggggaggccggtttcagcagatgaaaacaagagtcatgatgaaaattacccagcagtggttagtgtgaccataggaacattgtcatcaggtcagcagaaaacatatcagcaaatttttctcatactggcagtgtgtaggggtggatgtttacagttcctgaagccccagtggtcgtgtggtcttttagttttgccatttataggcaacttgtggtaactagctcaattagacacattccttatcacaaggacagagggctttctgtatcctagggttcttgccttggcattccagaagaatcaggtcacacgtggacgtggagaatgagtgcaaggttttattgagtggaagtagctctcagcagatgggggagccagaaaggagattggtttctccctggattggggccgttcagcagccctggctctcctctgactgccccaggcaaaatccacatcgttctataagtcggtgccctgctggtgtgctggtgcctgttgtcatgttcctcttcatgtccagccgcctgtgtgttcctccgctgatgtgctcctctcgacgtcaagcctcctgtgtgtctgactgctagggtcttggggtttttataagcacaggatgggtcttagcaggccaggatgatcttgggaaagacaacattcggtcaggaaaacaaaaatgcctgttgtcatctaggtccgtggggacaagcccaggtgtggagcttttagccagggaccacagcctcctgtatccaacacttcccttcaccttttctatatcattcaaagggatcatgcccttcccatcccagcacttcactttcatgtcatttgccccctctgaagaggtacatctaactgccattagaatatggatgatgaccagtcttagctgcttcctgctgaaagggggcattgttttgggggaaaacggcagtcagattcctcccaggggtctctataataaaagatcgaggtggctactttcaggaggtcctctaatgtactatctggtcccaagtcccatttctgcaacctcctcctgatgtcaggagctgcctgagtaataattttatcctttaggattatctgtccctcgattgaattaggagatagagaggtgtgatttaccaaggcctctcttagcctctccaggaaggcagtgggattttcatcaaatccctggttaattatggacaacttagtataattgagaggcttggtcttagacctacgtaagccctctattatgcacacctgaaagtgtctcctcttccagtcttccatctcattattgggatcccatttagggtccttcactggtgctacttctcttccagttggataatattcgctcccttccctgatgctataggtgatgcaaagctcatccccaaatctctctgctgctggcagagcagcctgcttctcagtgtctatcaggttctgactcaaaagtaacataacgtctctccaggagagttcaaatgttagggtgaaattctggaaagcttctatatatctatcagggtcatctgaacacttgcccagatctcccttaatttgctttaagtcttgtagggaaaagaggacttggaccttactgggcccaaattcactgggcatctgtaggaggggcaagagtgagactgggcttgtttgggatgaagatttctaggaggggccaggtgagaggctgaagctggatacggaggttggggtggacccagaggagcagggcttgagggagctggcacgtcagctgggggtgcgtctgggactcgtgtctttaattccctgggcttgaccctggcagccttccccgagacagcaaacaggagggctggaacaatcctacatgtcagcaaaggtctggattgctttgcaaggtatagaaagcctgcacatttggggcctcagaccatgtgtcctcacatccagagaaaagttctaattgcaggatggtattgaaatgaatggtcccttcctgaagccaagccagtccttcctgtaaaccataatttggccaaacctatgtgcggagggctatgagatgcttttcctctggattctgagggtcaaaacagtcccaatggttcaggatacactcaaggggagtacaagctgggggtggtgaggagaactggctgcccattctgaaagacagggaatagaggtgttcctcatttcccttccttcttttggcaaaaagctcagggtgtgatggggagggaaagcaagcatcttcacttcactttccacctcttacccctgcgccctggcaaccttggcaggtgccggccacaggtacaaatgcggtatgtacccatgaagcagggagaacctggagattaggaattaactgccctcacctatgtttccttttctccctgctgttgaaaaactttgagttccctgggcctttttatcccatgaggcatggcctccttctgtgggatggggttcagtcagcaggaattggtcctgtccatttacattgtgcctgttgcctggctttgaattcctcagacctgctttctctttctagggcctcagcctgaagcttggaattgagtttgggactgaaaaagcatttcagaggctgtttatatccatttagtgcctcaaataagccctgctgaatttgcaattatcagccagcaggggtcactcctctgttaacttccctattagaaacagagcggtggggattctcacttagaaaagaaaaaaagagaaaaacagttaaagaggcaaaaagtggggaatgctgggggaagaaccccttgcttagtgcaagtgggcccctctaatccttataactttcccatccttcccccagttcagaccaggttgaattccttggccatggaaggaaaggttccattgatgcagtgggtgagaagcactctgtagggtcctggctaccatcggttttctcacacccccctcatcccaggcagtggagggagacacttctgcgacattgctccccctgccccttcatggctattgggtgtggcctttgcctgctgcaggcatgcctaggtgctggagctgggagggaaaagggtaaggagaggtgccctggaagccgctcatgcctggggctgtcaaggtggaggcatacatggcacctctaggaaaaattggtctgatttgcacctttggcggctgagccaaatgctcattttacttagtaacattgcctcagcctgtagcaaaactcttaacattataaaggaagagataagatccatttcaaataatgtgtgagagagaaaagagatgaaaggaaaacagagtcttttacctgcaggaaagggagagaagtggcagagttttggaagaaaggcaggcccaacagtttcccattcactcacactcaccttccgagatcccagacgagccaccagttgaaatgggaaaagtttccttgtccccctcacaggaggtggagtgggggtgtggcttgcttctttagtactccgctgctcaaacctctagggaagcatacagactggcaagttgtggggctacaaccccatggcagcatctaggggtagatgtttacagctgctgaagccccagtggacatgtggtaccatgtgctcttttagttttgccatctataggtggctttgtggtaaccagctcaattagacccattccttaacccaaagacagagggctttctgtatcccgcggttgttacctaggtgtaccagaaaaatcaaatcacacgtggtcttggagaatgagtgcaaggttttattgagtggaagtagctctcagcagatgggggagccaaaagggagaatagttttcccctgaagtcgggttattcagcggcccaggctctcctctggctgccccagccaaactctatgtcaatccattggtcggtggcctgccagagtgctggtgcctgttggtggattcctctcagcgtcgagagtttttccctctcaggaaagggagagaagtggcagccacccatgtgttcttgcactgatgtgctcctctcgacgtccaacctcctgtgtgtctgcctgctagggtcccagagtttttttaggcacaggatagggcatggtgggccagggtgatcttgggaaatgcaacatttggtcaggaaaacaaaaatgcctgtcctcatctaggtccaggggcacaagcccaggtttggagccctagccagggaccccggcctcctctacccatcactttccttcaccttttctgtatcattcaaagggaccatgcccttcccttcccagcacttctcttctgtatcaataggtgatgtttttaaaatttcccaactctagtgcaggcatggtactagacatatacatagaaataaaaccacacttattcttctggctggcaagacatagtatttttgccaaattatgtgttgttttgaagcattttatgtacccctggtcatataaaaataaagctattttgttcagtacaaacagcagcattttctggattagaaagttaatcatcttaaaagatcatcacggatttttccattgcactcatcactaattgctttggcaaaaaatttcttatctcacgcatgacaaaatcagccgcagtatctcctagtaatttaatggtgatgatctttataaaggaaataagcacatcaagggaaaacataattttttttaaaaaaagagtaataaaactttttaaaagtcttttttaaaagactgcttttctaaaatagtaaaataaaactccaccaataaaaccaccaacaaaacagaaaagaaaaaataatgatatgatcggagctatttgatgaaagatggtaaattaaatttaaaatgattagaagagaaaaagcaatacctgtctcccgtaggtctcagtccaggttctgctatgcctttctcctggtgagccacctatttaagagtcgcttaaagcatatgttaatccaacaacagcagattaaaaaccaatgcaatctgaactatttgatctaaaaacataaataaaatttaaaacaaataaaagagaaaaagcagtacctgtgtcctgtaggtctcagtccaagatctgctctgactcccttgtggtgagttagccctttagaagtcacttggggtggggcatatgttaattccactaacattggttctggccaatgagtcaggaaggtggtaaatggcaccttttcttcttgctgatttctttcagttcctttggagtctggacattagtcctttgtcagatgcctagtttgtgactactgtttcctatactgtgggttgtgtgtttaccctgctgatatttcttctgccttgcagaagattttcggtttcattaggtcctattgatcttattctatttttatatttttgcgtttgcttttggggcattagtcatgactacttggcctaagccaatgtctagaaaagctttttggatgctatcttgtagcatttttagactttcaggtcttagatggaagtttttatatgctttgttaaagatcaggtgactgaaagtaccgggctttgtttctcggttctctattctgttccattgctctatgtgcctatttttatacttcctgcaccatttattgaataaagtgtcctttccccaattagtgtttttgcatactttgttgaagattagttgtctgtaagcatttggctttatttctgggttctctattctgttccattgctctatgtgcctatttttatacttcctgcaccatttattgaataaagtatcctttccccaattaatgtttttgtgtactttgttgaagattagttgtctgtaagcatttggctttatttctgggttctctattctgttctattgctctatgtgcatattttataccagtatcatgctattttggtgattgtagccttgtagtataatttaaagcctgccttcagatttgttctttttgcaaagtattgctttggatatgcggtcacgtttttggttttgtataaattttaggattcttttttctagttctgggaaggagaatgatgatattttgatgagaattctactgctctgtagatggctttggagagtatggtcactttcacaatattgattctacctattcataagcttataatgtgttcccatttgtttgtgtcaactgtgatttctttcagcactattttgtagttttccttgtaggaaacttacattaacctacttggttaagtatatttctaagtattttacttattaaaaattctcagggaaatgcaaagtaaaactgaggtgggaaattaaagaaaaataaaattaaaaagaaagggaaataagctttcttgtattaagctaacttgtcccagaggcagcaacaggcacagcccagacccaggaaaagtcttgataatattatttattgtattctggagactcttccagcactccttcaatgtagggagaagaaaaacaaattttcctttgttttatggtatgagtttatagattcttgttctctttaactagtaacttcaagtattctgttttatctaagaagtatggcaaaggtcatgagaagcctgagcaggcctgaactacagctctctaggcaccatagtgaagataaaccaatgcaagcctctttagagcaaaacctagataatagacatctgggttgcatagcaacagttatgtgcaatcctgagttatgaacctgttacaatttgattaactgtctttttcctgcctctgtatccctgctttcacaccactgtaagcttgcttcaagctggcccacccccttttgtgaagtgtgtataaaagtcaagtgctgtctttgttccaggccctgtctttggacgtgagtctgctgggcctgagagcactcaataaaagattctcctgttttaacccaaagcctctctctcatcctcctaaatcccacaacaaaaccacaatgagatgctatcttaatcttgctagaagcccataatttaaaagtcagaaaacaatagatgttggcatagatgtggtcaaaagggagcactttgacactgctagtgggaatttaaactagtccgaccactatggtaaacagtatggggattccttaaagaactaaaagtagaccattcattccagcaatcccattactggctatctacccaaaggaaaagaagttattccataaaaaagacacaagaatatggatgtttatagcagccgattcgcaattgcagtgatatgggaccaacttaagtgcccatcaacgaacgagtggataaagcaaatgtggtacaccatggaataatacttgataataaaaaggaacaaaataatgtcctttgcaacaagttggatggaactggaagccattattctaagtgaagtaactgaggaatggcaaatcaaatattgaatgttttcacttttaaatgagagttaagctatgagaatgcaaaggcataagaatgatataatggacttggggactcagggggaaaggttgggagggggatgaggaataaatgatgacatattgggtatattatacactgctcaggagacagatgcctcaaaatctcagaaattaccactaaggaacttttatccacataaccaaaaaccacatatattccacacactattgaaagaaacataaacattattttaaaaaataaagccacttttaaaattagcaaaataaaataaatatgtcttcagagtttagatattggatccaaattagacagatcaaatactgcctttactaaatattttcatgtcattaacaacttctaaaacctttcaaacagttttttgacatgtcttggaaccatccatttctagctaaggcctgggcacctgtgaaatagggccatgcccccccttatactgggaagagtaagatatttcaagactaagatgttttctacagctccatctttttctttaagctctacatcaaggacataattaaaattggttgtctcctaagtggtttactaaaaatgcatacttaagagttaccattataattaatatttgtatctaaagctacttaaaaattttcacacacaaatctgactgaacaagtaaaatatattttaagtcaaagtttataaaaggacatgagaacatagcttttatgaaaaaattagttttgtcaagtttagaggttttcaaatattttaaattcaggaaataaaataacaaaaagacaaaagaaaatggttgaacaacttagaaaaggtttgttaaaattcatcttataaaacaatctacatgtaaaaagtgggctaaaatttgaaagagattatttaggttttccataaattaatccagaaggggtaggaagtcttaagaatgaggaaggacaggaggaaggggaggtcatcctgacactgcagaggcagaagtgcagctgaaggtatgaaggctaagaggggaggggagtttgagtgctgctgcctggctgtcagagcagaggagggtcctgggcaccagacttgaggaagggatgaaaatgctgggcagacctgtagtgggcccttgagatggcagatagtggtttccagagagagggccattgttttccagtgcccagcactgagcagagagagttttgggcagtgtaaaaaaaaaaagagaacttacctctttctcgttttagaaaaagaacagtctaagaatatcagcagggaaactctcagtgcttcaaggggttaaacgcccttttggctttcttgtgttggtttcatcatagaggaggagaaacttcttggaagtgttcctaaaaacacaacacgtctgcttctcctttcaaaaaaggaagtgctaaaacacgaacactctagatccaaatattaatacggatgtctaaatgcttccgttttccaaggggcagaaagctaaaggttgtaacctattcatttcagtcaaagttggtgaaagggaagcaaaggaactgggtggggcttggaaggatgacgaagctcaagctcattggccagcaacctctctcctgggggcgggaggggtgagcatacgtcattgctttggcttctataaaatgaggaggactcaccgagtgtgaagagtccttctggtgattgcagctgagagcacactcacgacgttctgcaaggattctctgattatgattctgaagggaaaagcgatggaatggacagcagagattgtaattttctttatcttgaattacggaagaaagtatctaggacagaaatccacgacaagtccttggaaccagcagatctcttcgttcacggagacgttgacgtattctctattgaagaagattcttaccttcttactggacaaggttttgtcagttctgcgtgactggattgtccgggagactctgaggaaactgatgtcacatgtttttccaaagaagatgtttctggaaccaacaactgtgattgtggtttgaggacttctgagagttccagtacaggaaataagcagaacatcagctggaggctaaacggatccagacttcactcttcacttcccttcctattcagtctattgtgcctgctgactgagaagcttggctggtatgtgagcaaataaacggaactattcagaaggagatgttgacatattctgtattgaagaagatccttatcttctcacctgacaaggttttgtcagttctgtgtgactggattgtccggaagactctgaggaaactgatgtcacatgtttttccaaagaagatgtttctggaaccaacaactgtgattgtggtttgaggacgcctgggagttccggtatgcgaaataagcagaacatcagctggcggctgaagggatgcagcctccactcttcacttcccttgccattccatctattgtgtctgcctgactgagaagcttggctggtatgtgaggaaataaacggaattataaacaaggagattgtttctcatctacttcattctgttgtggcttttctattttggggttcagggtgtgtgacaaggaccaaggagatgaaaggtttcatgatggagaaagcccaggcaatcagattgaagagctatccacagggaatcttggctgctgaggggctgcaccctgcaacggactgaccatatgacagaaaagggttttaaaggctcaacttctggactgagaacccagagtaatttgggaacctcctctgtgaggagatatgaaagctgggaatcatgacatccctaggaatggaaggcacatttcctgatggaaggggtgctttggaaaacaggagcagagtagacacagcagccttgtggatacgggtgggcagcatgcatgggtgatgtgaacgtggagtgtttgtgatcgaaactcaaaatgtctgacaaagtgaaaacctagaaaccacaatgaggaggaagagtttgtgagggcaatcactctccccatgtgtgaaaatcgggggctcttaaaatctcatctggagaggtgcagtctaccaaactctgggactttagcctccccttttaaaaaaccgtgcatcaataccaacgtccgaaaccacagaaataacacctggcttgcatggagacaaggacaaaaagccgtcatgatgagttgttctgctcacttgctgcctctgttcagtgcacaggatattgtccacccactagcaggctactgcaagagaagtgtgcaatatgttccctatgtgccatatatgtgccatatggcccatatgacaactgagtcagaaaatatctgatgccctcagagttacactccacctggagcttgcccccagccatccaggacctaggctccctaccctgtccaattttctggtgttttgggggcttcattctctaaggtgtgcccactctttactcaaaccaaaacacccacatattcctgcccatgaacaaccaatcaaccacttctcagttccacatcctgctgttgggtctctagtggtgacactgtaactcccaggtcatagtggtgacactataacacctagctaaattgatgccttgtctctaggaggccatgggctcctgcaggtctcatctgactctctgtagccttccctgacaatgctcacaatacccaagccagagccacattgacagcaagctgctctcatcttacctttgccagacctggccactggaaaaggctgaccctcatcctgcaatgcctatacctccaacctttgtctcaagctggtgtcctggagggacttctaagcagaaaacagattcagactcccatcctctcctgaatggcctcatatccaattctcagaccctcagccttcattgtaaggacacttcatccatgcccttgagtattctgtctgcactgtgtattctgcaatagattctcctccctctgcgaccctcaactccttccgcagactttttgttttcttgatcatctaccatagtcttccactgggacactgccaagcccattctggagagtgagttgtgcaagtacactgccccccatctacctttcgggaggtgtatacacccttctttctcccaggtctggaggctttctattttcatcctgaggcatctccacctgctcttggattcttcaaattgacaaccaccagttaacaagaactatgtgtcaccaaatagccaaacaatggcaattacaaaaataaaattaatagctgtaacccccattagcaaggatacacaaatcaaatcagggatagtgggtgaggaagtctgcctaacattcaaggaaggattctgaagtgatacaaaatcattgcctttgctatctttagaatggacactttcagccaggcacagttgctcagcctgtaatcccagcactctgagagccccagttgggtggatcacttgaggccagcagcttgagaccaccctgggcaatgtgcagaaaccccaactctactaaaaatacaaaaatagccagttattgtggcacatgcctgtaatcccaactccttgggaggctgaggcacaagaatcacttgaatctgggagccagagtttgtaatgagcgaagatcatgccactgcactctagcctaggcattagagtgataatctgtctgtggaaaataaaaacattcctcttcaaagttttcttctttaaatcataaatgttggaattaatatatcctctttgaaactcactttcttcaagcttctttatttgatggtagtaaatctttgttaagctttatgaggcaagagtaatggaagaagcatattatatatatttatactctaacctcagtgcttgttctagcaagctcaggcatgcgtgaatgtgcccaggcatgttccagcccataccttatatcctttccttattgggaaatgctgttactcctataagcattcttgtaagcaacttcctctttttctttgtctccactatctttacctattgaggacagttttaggttcttagccagttggatgtagcatagactgtgaggtccaaccccagccaatggagatagcacacagcagtagcgacctcatgcttaacagataaatattcctgtctccctttgtttggggtgctctcagctgatgagcaacaccctttctaaagaaattaaagttgtcttgctgagaaaacttttggtctaaatgctgattcttccttgcagcactgaagaagaagcaattatttccaacactttctcatacacaaaaaaagaagaaggtggaagaaaactttcttgtgcaccctatccctcactcagaaagacaacagaaggctcctagtggcaagccctagaggattcatttcttttgggaaccctcttggctgggatactaggactcaggtcaaactcagcattttcagtgtgtgggaagtgtgcttgggtttcactgttacttccaataatgtgatttggtccttggggttcaccaaattttggtatggagtggtgaaccctgttaagtttaagtgtctataaaattaacaaagcaaaataaccattctgccccatggttcagagaccaaatattgtgtaggaaatgctttagcgagagaaacagagaagaataaaaaatgtcctcaagcgctgcattatttcttgttatcgtccagatcttagaggaaaggctttcattttccctcattcagtatgatattagctgtgcatctgtcatttatggcttttattatgttggggtatgttccctgtgtatgtagttttttcagggtttttgttatgaagtgatgttgaactttatcaaacgtttttcagtttcagttgaaacgatcatatgctttttgtccttcattctcttgatatgatgcatcatgttgatgatttccatatggtgcactgtccttgcatcctgggcatgaattccacttgatcatgacaaatgaatttttaatgcattcttgaattccgtttgctggtattttgttgaggatttttgcatcaatattcatcagagatattggcctgcagtttctttttttttcttttttctttgttttgttgtttgtttgtttgtttgttttgatgtgtctatgtctggttttggtatctgggtagtagtgttccatccccttttattttttagaataatttgaataagactggtgttggttctttaaatatttggtagaattccgaagtgaagtcattgggccccgggcttttctttagtggaaggctgtttattatggcttcaatctcgttacttattattggtctattcatgttttgaatttgttccttatttaatcttggtaggctgtgtgtatctaggaatttgtccatttcttttagattttcaaatttattggcacataattgcccattgtagcctctaatcgtcatttgagttcctgcagtaccaattataatgtctccttcttcatttttgattgtatttatttggatcctgcccctttttttcttacttaggctgcctaataatttcttaattttgttgaactttttcttttgtttgtctcgctctgccaccaggctggagtgtagtggtgtgatcttggctcactggaacctccgtctcccaggttcaagcaattctcctgcctcaccctcccaaatagctgggactacaggcaagtgccaccactcccagctaatttttgtatttttagtagacacgggttttcaccatgttggccaggatggtctcgatctcttgacttcataatccacctgcctcagcctcccaaagtgctgggattacaggcatgagccactgcgcccagcctaattttgtttaaattttcaagaaatcaacttcttctttcattgatttctgtattttttatttccattttatttatttaaactctaagctttattctatcttcttctcattttagctttggtatgcttattgcctctctagctctttaatgtgcattgttagattgtttatttgaagttcttcctctctacaccataagacgtaagcatgtcctcattatgtcataagatgtaaccacttacagctataaacttccttcttagttctgcttttgctgtatctcataggctttgttatgttgtgtttccattatcaattgtgtcagaaatttttcaatatttttcttaatttcttcattgagcaactgatcatttgggagcatatttttaaacttccatgtacttacatagtttccaaaatacctcttgtgatcaatttctagttttattccactatggttcaagaagatgcttgatattatttcaattttttttcacattttaagatgtgttttgtgacctaacatatggtctactttttttttttattaaactttaagttgtggggtacatgtgtagaccgtgcagttttgttacataggtatacacgtgccatggtggtttgctgctcccattaacctgtcatctacattaggtacttctcataatgctatccctcccctaacctccaccctctgacaggacctggtgtgtgatgttcccctccctgtgtccatgtgatctatttttgagaatgatccatgtggattagaatgctgtggaaaagactttggattcctaatatccagggagggagacgatgatattactttcaatatcacacgggtgtacacactctctgtgacattgttcctaatatccagtggaagagaggatgatataacacccagggagggagaggatgatattactcttaatattgcagggtgtgtacccatgcctatgatattgttcctaatatcaggagggggagaggatgatattactcagaatatggcagggggtgtacacacactctgtgacatggttcttaatatacaggggagaatgggacaatattactctcaatatcgcagggggcgtacaaccctgtgatttgttcctaatatacaaaaggggacagtatgatattgttcctaaaatcgcagaaggtgtacaacgccctgtgatattgttcctaatatccagggcgggagaggatgatattacccccaatatcacagggggtgtgcactttccctgttacattgttcctatgatccgagtggggggaaatgacattagtcccaatatcgcaggatgtgtacactactcccccatgatattgttcctaatatcaagggggagagaggaggatattactcccaatatcgcaagggaggtacatcctccatgcaatattgttcgtaatattcaggaggagagaggaagatattactctcaatatcgcagaaagtggacacccaccctgtgatgttcttcataatatccagggaagcagacgattatatgactttcaatatcgctgggagtgtacatcccttttgggatattgtttctaatatccaggaagggagaggattatattacttccagtattgcagccagtgtacacatttcttgtgatattgttcctaatatccagaaagggaaaggatgatattactcccaatattgcaggtggtgtacacccccctctgatattgttccttacatcaaggaaaagaaagaagaatattactcccaatatcgaagagagtgtacacccctcctgtgatattgtatttaatatccatggggaaagaggatgttgttactcccaatatcgcagggggtttacacccacactgtgatattgttcctaaaatccagtgaaggagaaaataatattgctcccaatattgcagggtgtatacaggccctcccccgttatattgctcctaatatccagcggtggagaggatattactttcaatttttgcagggagtgtgtaccccctctctgatatttttctaatatcaaggatgggaaaggatgccattactcccaatatcgcaggaggtgtacatgccctgtgatattgttcctaatatccagggaggtagaggatgatattactttcaatattgcaggggctgtacaccctctatgatgttgttattaatatttaggttgggagaaaatgatatttttcctaatatcctgggaaggaaaggatgatattactgtaaatattccagggagtgtacaccttcctaatattctaatattgttcctaatatccaggggtgggagaggattatattactcccaatatcgcagtgggtgtacacccctcctgtgatgttgtttctaatatccaagcgaggagaaaatgatatcactctcaataccgcagggggtgtacaccttccccatcatatcgttcctaatattcagagggaaagaagatgatgttactttcaatatcgcaggggttgtacacaacccctgtgatatttctcctaatatccaggaagaaagaggatgatattgctcccattatagcagacggtatacgcctccctgtaacattgtttctaatatcaagactgggagaggatgatatcacttccagtatcgcaaggggtgtacacctcccccgtgatattgttactaatatccagggggaagaggataatattactttcaatattgcaggggctgtacacccccgtgatattgttgttaatatttaggttgggagaaaatgatattagtccaaatatcgcagagagtgtacacacttccgataatattgttcttaatatccatgggggagacgatgatattacacccaatatcgcagggggtgtagtctccccttgtgatattgtccctaatattcagggaagtaaacgatgatgttagtgtgaatattccagggagtgtacaccccctttgtgatattgtcctaatatccgcaggagagaagataatattactcccaatatcgcagggggtgaacacaccccctgtgatattgtttctaatatccaagcgaggagaaaataatattactcccaatgtctcaggggatatacaccttccctatgatattgtttctaatattcaggtggaaaacgggtgatattactcctaatatccaggaagaaaggggattatgttactccccttatagcagggggtatacacctcccctgtaatattgttcctaatatcaaggctgggatatacgtggggggaaggatgatattactcccaatatcacaggggttataaaaccttctgtgatattgctcctaataaccatggcggaagaagatgatattactcctaatattgcaggaggtgtacactcccccattatgttgttcctagtatgcagaaaaggagaggatgacattattgccaatatcgcagggtgtgtacaccacccatgatattgttcctaatatttagagggacagaggatgatattactcccaatatcgcagggggtgtacacgcatcccctgtgatattgttcttgaaatcgaggggaaagagaattatatttctctaaatattgcagagggtgtacaccgccccctgtgatattgttcctaatagccgggggcggggggagataattaaattactttcaatatctcagagagtgtacatcccccttgtgacattgttcctaatatccagagcaaaagagaatgatattcctcccagtatcgcaggaagtgtacatttaacctgtaatattgtttctaatatccagggggaagagaatagtaatactcccaatatcgtaggggttgtacaccttttctgtgatattgttgcaaatatttagaagagagagagaatattactcgcaatatcacagggaatgtatacttcccctgtgatattgttctaatatctagaaaaagagaggataatattactcctaatattgcagggggtgtacacccccacttgtgatattgttcctaatataaaggaaggtcgaaaaacaaacggggagcccagggggaaggaaggcaggcgaggaagaggcagcgccggggcgccggagggagcagccgggccgcggaagcgcgagcacgagaccggtcgcggtcgcagtcgcatttttgccgttgtcgcggccgccgccgccgaggcttacccggggatgtctgagcccgcgcctcgcggcccccaagctccacgctgcgcccgctgtcccggcctctaagggccgccacgtccctgcggcgcgcgcaggcagaaagcggcttcgtgccggcggagggggcccgggcgggccgggaaaggctgccccaggccccgcgcctaccccatcaccgcggccggcgccgggccgggaggatgagcggtgtggggctctgaagcatggagggggttttgtacaagtggaccaactatctcacaggttggcagcctcgttggtttgttttagataatggaatcttatcctattatgattcacaagatgatgtttgcaaagggagcaaaggaagcataaagatggcagtttgtgaaattaaaggtgacagctttggaggggaccacccttgattggatacataaattctgttcattcagcagacaacacaagaatggaattaatcattcctggagagcagcatttctacatgaaggcagtgaacgcagctgaaagacagaggtggctggtcgctctggggagctccaaagcatgtttgactgatacaaggactaaaaacgaaaaagaaagaagtgaaaccagtgaatcgctgaaaaccaaaatgtctgaacttcgcctctactgtgacctcttaatgcagcaagttcatacgatacaggaatttgttcaccacgatgagaatcattcatctcctagtgcagagaacatcaatgaagcctcttctctgcttagtgccacgtgtaacacgttcatcacaacgcttgaggaatgtgtgaagatagccaatgccaggtttaaacctgagatgtttcaacggcaccatccggatcccttagtttctcctgtgtcaccttctcctgttcaaatgaggaagcgttctgtcagccaccctggttcttgcaccagggaggagtagccactgtataaaagaaccagtatctgcacttcaccgactctcccagcgacgccgaagaacctactcagatacagattcttgtagtgatattcctcttgaagacccagatagacctgttcactgttcaaaaaatacacttaatggagatttggcatcagcaaccattcctgaagaaagcagacttatggccaaaaaacaatctgaatcagaagatactcttccatccttctcttcctgaagaaactgtagtgtccaactttctctaagtattgctatgcaaaagctgctgtaattgaactattgttatagggagtagttttttcccttaggactctgcactttatagaatattgtaaaacagacaaacaagaaaacaaaccacatacttttgaagcgtgttttatctttatatagtttgtttgcaagagtattttcctaataacttcacagtatgaatgtgcatcttttttttctttttttaacaaatgatggtgtaacattttgacatccataaggacaaatgtagatatttttctaaaaaaccgtgaggggactgacagcttggtcagggtgtattgtagcttataaacatgaaatcttacaaggtttcagtttgacagaagtgtgatatatgtaacttgtgccatggaccaaatggtcactttaccacagctaaaaatgagttatgatagcagcttgatggtgattgcattgtattcctttaatcaaaaaggaaacgcaatattctaagtatctttagcccaaataccatgacatattgagcatctttaaataaccagactgtattgtccttcatatgtgaagttgacactactgatttgtcaataccaaattttgggttaaagtgtttaatttttatttatttattttcttgttgcctcaaaagatgattgcattctaacttttgtgacctaccaaatttaagatgtgtatacattgttctttacgttgttctagaaaagagattttaatgctgtagtgacttagctcacttacatcagagaaataaacaactttcaatggaaaaaaatatatataaaggaaggaagaggatgatattacttctcatatagaaggggttgtacaccccccttgtgatattgttcctaatattcagggagggagaggattatattactcccaatatagcagggagtgtacacccccccccccgtgataatgttcctaatattcagggaagcagaggatgatattactttcaatatcacagggggtgtgctgtccccctgttatattgttcttaatattcaggggggagaggatattattatgcccgatatcacaggagaagtacaccccacaagtgatattgttcctaatatccaggggtaaagaggatgatatcgcaggtggtgtacacccctccccgtgatattgtttctaatataaagaaggagagagcatgatattactcccaatatcgctggaggtctacaccccccttgtgatactgttcctaatatccaggaagggaaacaatgatattgctgtgaatattccagggggtgtacacccctttgtaatattgttcctcatatccagggggtagagaggatgatattactcccaatatcgcagggggtgcacggccccactgtgatattgtttttcatatccaggaggggagaggatgacattactctcaatatggcagggggcgaacaccccctgtgatattgtgctagttaggttgggagaaaatgatattactcccaatatcgcagggggtgtacaccgctcctgtgatattgttcctaatatccatgacgggagaggatattactcccaatatcgcagggggtgtacctctcccctgtgggattgttcacagtatccaaaagggaagaggatgatgttactcccaatatcacagggagtgtacaccaccattgtgatattgttcctaatagccagggaagaaaacgatgatattattgtgaatattacagggggtgtacacaccccctgtgatatggtttttaatatacaggttggaaaaggatgatattactcccaatatcacaaaaggtgtacacacccccccatgatattgttcttaatacttcggtggggagaaaatgatattagtctccatatcacaggggtgtgaactcctccggtgatattgtttttaatatcaagaggggaggagatgatattgctttcaatatcgctgggggtgtacatccctcctgtgatattgttccttatatccaggcgaggggaaaataatattactcccaatagtacacaccccatgtggtattgttcctaatactcagggggaaagaagataatattactttcaatatcacagggtttgtacacctttcctgtggtatagttttcaatatccagggggaaggtacatgatattactcccattgcagcaaggggtgtacacacctcctgtgatattgttcctaatatccagaagtggtgaggatgatattactcccagggggtgtacaccccacctatgatattgtttctaatatccaggggaaaagagtgtgatattatgcccaatatcgcagagggtgtacacttatcctgggatattgtttctagtatttggggagggaggagaggatgctattattctcaatatcgcagaaattgtacacccccgctgtgatattcttcataataatcagggaaaaagaggatgatattactaccaatattgcagggggttacacttcccctttggtagtgttcctaatatccaggaagaaagaggatgatattaatcccattttccaggaagtgtacacccaccgtgtcatgttgttcctaatatccagcagggaagaggatgatattactcccaatatcggagagggtgtacacttcccctgttatattgtttctaatacccagggggaagaaggatgacattactgccaatatcacagggtgtgtaccccaccctgctattgttcctaatattcaaaaggaaagatgaaaatattactcccaatatctcagggtgtgtacacctctcctgtgatatcgttcctaatatccacaggaagagagaatattactctcaatattgcaggggggtgtacacccccctgtgatattgttccaaatattcgggcggggagaggatgatattagtcccaatatcgcagggggtgtgcaccaacctgtgatattgttcctaatatccatgcgggggaggacgatatcactctcaatgtcgcaggaagtgtacacctctcttgttatatttttcttaatatccaggagggaaaagatgatattactgccaatatcgcagggtgtgtccaccccccttttatattgttcctaatatccaatggaaaagaggatgacattgctctccatatcccagaaggtgtacaacgcccctgtaatattgttcctaatattttgggggaagagaggatgatataacttataatatcacaggaggtgtacaccacccctatgtattgttcctaatatcctttaagggagaggatgatattactcccaatatctcaggtggtgcctattccccctgtgatattgtttttaatatccaggggaagagagtatgatattacgcccaatatcgcagggggcatacaccctctctgagatattgttcataatatatagagggagagaggatgatattacttccaatatcagaggtggggtacaccccccggttatattattcttgatatccaggaggggagaggttgatattactggatatatagcagggagtgttcacatcttctgtgatactgttcctaatatccagaaaagtagaggatgatattactcccaatatcgcagaacgtgtacacctccctgtgatattgatcctaacattcaaaggggagaggatgatattactcaaaacatcacagggcatgtacactcccctgtgatattgttcctagtatccagaagggagcaagataatattactttcaatatcgcagggggtgtacacccctctttggtatgtttcctaatatccagaaggaaagagggtgctattactttccatattgcaaggggtgtacacccccctgtggtatggttcataatatccagggagggaaagggtgctattattccccatatcgcgaggcatgtacaccctgctgcggtacggttcctaatatccagggggaaagaggatgctattacttcccatatcgcggggtgtgtacacccccgtgtggtatgttttgtaatctccgggaacgaagagggtgttattacccctcatatcgctggaaatgtacactcccctgtggtacggttcacaatatccaggggattgagggtgctattactccccatatcgcggggggagtgcacctccctgtggtatggttcgaaatatccagggtaagagagggtgctattattccccattttgcaggaggcgtacacccctctatggtatgttttgtaatatcccaggtaaggggtgctattgagagaagagagcaaaagaccccccccatattgttctgtattattttatactcagtacctgttttaagaagaaacaaggaagcgaaaccaaaggcaggcagcccggcgccaggcaccagatccaaaaccagacccgaaaccaggcctgggccttcctgaccttagcctgaaagttaaaattcaacccatgacctagcaactgatgttatccatagattccagacattgtatggaaggacattgtgaaatttcttgttctgttctgtttcactctgagtactggtgcatgcagcccttgtcacatacccactagattgctcaatcaatcatggccctttcatgtaaaaaccttagtgttgtgagcccttaaaaaggacagaaattgtgcactcaacaagcttggattttgatactctagtctgctgatgcttccagctgattaaaagccacttccttcactacctcggtgtctgtgggattttgtccgcggctcctcctgctacactgtgactccccttatagagaggggtgtacacccccctttggttcctaatatccagcgggggagtaggtgctattactccccatattgcggggagtgtacacccccttgtagtacggatcgtaaaatcaaggagggagagaaggtgtaattatccccatatcacagggagtgtacacccctttgtggtatagtttgtaatatccacgacgggagagaatgctattactccccatatcgtggagggtgtacaccgccctgtagtatggttcgtaatatccggaaggggagaggttgctattactccccatatggtgggaagtgtacacccccatgtgatatggttcataatatccaggggggtagaggatgatattacccacaatatcatagaaggtgcacacccttttgtgatattgtccataaaatccagaaggggagaggatgatattacttccaatatcacagggggtgtgtagccccatatgatattgtttgtaatatcaaggtagggagaggatgctattccttacaatagctcaaggggtgtaaccttcttgtgatattgtttgtaatatccagaaggggagaagataatttttttattttaaaagtaaactttaatgtcaaaaatgcaaacttgagaagggcagaaagatcaaacagaaggctgccacttcacaattggagggttgcacagtggccgggcagaggcgctcctcactccccagacggtgaggcagccgggcagaggtgctcctcacttccgagatgttgcaggagccgggcagaggtgctcctcacttcccagaacagggggctgccgggcagaggtgctcctcactgcccagacggtttgcaggcctggcagaggcactcctcacttcccaaacggagcagcggcaagccagaggcgctccacacttcccagatggtggggcagccgggcagaggcgatcctcacttctcagagggtagggcggcccagcagaggcgctcctcacttcccacatggtggggcggcaggctagaggcgatcctcacttcccagacggtggtgtggccatgcagaggtgctcctcacttcccagatggtgtggccgccgagctgaggcactcctcacttccctgacagtggggcggctgggcagaggcgctcctcacttcccagacacttggactccgggcagagactctcctcatttcccagatggtggggctgccgggcagaggcgctcctcacttcccagacggttcagaggccgggcagaggcgctctggggagaggataatgttactcccaatatcgcagggggtgcacactccctgtgatattgttccgaatatccagagggggaaaggatgatatagctcccaaaatcgtggggagtgtacacccccctgtgatcttgtttgtaataccaagaagaaaagagaatgctattatttccaatatagcagggggagtacaaccccctgtgatattgttcgtaatatctagggggagagaaaattatattagtcttaatatctcaggggacgttcatccccctgtaatattgttggtaatattcagaatggagaagatgatattgttcttaaaatacaggaaaaaatatgataatattacttccaatatcgaagggggtgtacactctcctgtgatattgttcccaatatccagaatgaaagaggatgctattactcccaatatcccagggagtgtacacccctttgccatattgttcataatatccaggggaagacaggataacattactcccaatatcaccgggggtgtccacccactagtgatatttattgttcatcatatccagaaaaggagaggatgatattactcccaatattgcaggtggtgtacggtccctgtgatattctttgaaatatctagaaaaggagaggatgatatcactccgagtatcacagggggtgtacacccccctgtgatattgttcgtaatatccaggggagaaaaggatgatataattgccaatatttcaggggatgtgcacctccctgtgatattgtttgtaatatccaggggtggagaggatgatattactcaaaataacgtaaacatcctgtgtgtacatcccctgtgatattgtttataatatccaggggggtagaagatgacattacccccaatatcacagagtgtacacacccctgggatactgttcataatatccaggcgggaaagaatgaactacttccaatatcgcaggatatgtacacccccctgtgatatatttcctaatatttatgtgggtaaggatattacccccaatatcacagaaggtgtacatcctctttgtgatattattcctaacatccaggaaaggagagaatgatattactcccagtatcgcagggggtgtacaccacccctgtgatattgttgctaatatccagggggagaggataatattactcccaaaatcacaggggacgtacactcctcctgagatattgttcctaatattcatggggaaaagaatgctactactccaaatacagcagagggtgtacaccatccccgtgatattgttttttatatccaaagggtgaaaggctgatattactcccaatatcgcagggggtgtacaggccccccatgatatcattcttaatatccagggaggcaaagaatgatgttactcccaatattgcaggctgtatacaccccccgtgatattgttcctaatatccagagtaagagaggatgacattgctcccaatattgcaggggttgcacgcacgccctgtgataatattactcccaatatcaacagtgggtgtacactcctcctgtgatattgtttgttatatctaagaaagaagaggatgatattactgtcaatatcacagaaggtgtacagccccttgtgatgttgtttctaatatccagcggtgagaggatggtattactcgcaatattgtagggggtgtccaacggccctgtgatattgtttctcatattcaaaaaggaaaagaataatataactccaaatatcgcagggtgtgtacacttccctgtgatattgatcctaatatccaggaagagagaggatgatattaatcccaatatcacagggggtgtacatcgcttctgtgatattcttcctaatatccagggggggaggggatgctattactcttaaaatcgcagggaacttacactcccactatgatatttttcctaatatccaggaagggagaaaatgatattactcctaatatcacatatcacaatgggtgtacatctccccgtgatattgtttctaatatcaaggatgggagaaaattatattactctcaatatcgcagggggtgtgcacacctcctgtgatattgttcctagtatccagcggaggagatgatattactttaaatattgtagaaggtgtacaacccccctttgatattgttcctaatatccagggggaaaggagatgatattactcctaatatcgcaggggctgtacaaccctatgtgatattgtttcttctaatatccaggggtggagaagataatattactcctaaaatcgaaggggacatacactccccctgtgatatttttcctaatatccagaaggaaagaggatgatattactcctaatattacaagaaatgtatacctgtcctgtgatattgttcctaatatccagaggggtaaatgattatattactcccaatatcgcaggggtgtacaccttccctgagatattgtttctaatatgcagtggaggagaggatggtattactcccaacatcacaggagatgtaaactccccttgtgatattcttcctaatgttcaggacgaaggagggtaatattactcactgtattgcagcagggggtgtagagccccctgtgatattgtttttaatattcaaggttggagaaaataatattccttccaatatcgcatggggtgtacacccttctttttatatagtttctaatatctggggggagaggatgatattactcccaatatcgcagggggattacacccccactgtgatattgtttttaatatccagggtgggagaggataatattactccaaatatcccagggctatacaccctccgtgtgatattgtttctaatatccagaggaagagaagatgatattactcccaatgtcacagggtgtgtacaggccttctttgatattgttcttaatatccatgagggagaggatgatattactcccaatatcgcaaagactgtacaccctttctgtgatattgcttccaatatccagggagggagaggatattacactcaggatcacagggggtgtacaccccaacctgtgatattgtttctaatatctagggaaaatgagggtgatattactatcaatatcacaggaggtgtacactcccttatgatattgttcctaatatccaggagaatgacaggataatattactcccaatatcgcgggtggtgtctccccccactccgtgatattgttcctaatacccagagggggagagaatcatattactcccaatatcgcaggggatgtacacctacatccggcggagtagaagataatattactcacaatatcgcaagaagtgttcaccttccctgttatattgttgctaatatccagggagtgagaagatgatattactttcaatactgagcgtgtacactacccctgtgatattgtttctcatatccagtagaggagaaaatcatgttactcccaatattgcaggggtgaacacctcctttgtgatatttttcctaatatcaggaaagggagagtatgatattacccttaatattgacaggggtgtacacccccctttgatattgttccaatatccaggggggcagaggataatattattcccaatatcgcagagggtgtacaccccccgtgatattgttcctaatatccagagaaataaaaaatagtattatttccaatatcacagggcgtacattttccctgtaattttgttcctaatatctggggggtggggtggcaggataatattactctcaatattggagagggtgtacacccccctgtgatattgttcctaatattcagggtgggagagaatgatgttactcccaatatctcaggagtcgtatacacccccttgtgatattttttctaatatccaggaggcagaggatgatattgctcccaatatcgcagggggtatacacccgagctgtgatattgtttctaatatgcaatatgggggaaggatgattttactttcaatatcgcagggaatgtacactttccttgtgattttgttcctaatatccaggggtggagaagatgctattactatattactcctcatatcgcaggcggtgtacaactccctgtgatatggttcagaatatccagagtgaaaaaggagggtgacattactcccaatatcgggggggtgtacacccctttgtgatgtggttggtaatatccaggggggcagatgagggtgatatcactccccatatcgtggaaggcgtccacttttttgtgatgtggttctttatatcccgaggggagaaggtgatattactccccatatcgcgaagggcatacacccccctgtgatatagctcataatattccggagagtggaggaagatactatgccctatatcgcgggtggcctacaaccccctatggtttggcttataatatccaggggggagagggtaatattgctccccatattgtggagacgtacagccccctgtgatatggtttgtaatatctttggggggcgagggtgatattactccccatatcgcggggagcatacacccccgtgatctggttcatagtatctcaaaggaagaagttgatgtgtacaacttaagggaaaaagttgaagtgaagtgtacacacgccctgtgacgtggttcataatatccaggcgggggagaggagagtgatatttactccccatatcgcgggtgttgtaaactcccctgtgatatagttcataatatccaggggagagaggagggtgatattgctcctcatatcgcgaagggtgtacaaccccctgtgatatggttcataatatccagaagggtagaggacgatgatattactccacatatcttgggaggtgtgatatggttcgtaatatccagcgatgagagaatgatattactccccatatcgcaaaaggtgtgatagggtttgtaatatcctgagggggagagggtgatattaatccctatattgcagaaggactacaccctcccatgacatggtttgtaatatcccagggggtagagtgtgatattactttccatatcacagggggtgtgatatgattcgtaatattcgaagggggagagggtgacactactctccatatcacggggtgtgtgatatggttcttaatatcccaggggttagaggttgatattaccccctttttggggggtgtgtacaccccctgtgatatggttcgtaatatcccgggggagacagggtgacattattccccatatcgaggggatcgtacaccccctgtggtgtggttcataatatccctagggggagatggtgatattactccccatatcagggggcgtgcactcttctgtggtataattagtaatatccagggggcagaggtcgatattcgtttccatatcatgaagggagtacacttccctgtgatatggttcctaatatccaggggggagagggtgatattattccccatattgcggggggacatacaacccctgtgatatggttcataataaccagaaaagaagagggtgatattaatccccgtattgcagagggcatacaccccccctgtgatatggtttgtaatatctaggggaggaaaaggtgatattactttccatattgctgggtgcagacacccctttatgatatggttcataatatccaagttggagagggtgatattacttcccatatcatgggaggtatacccttccctgtgatatggttcgtaatatccagaaggggagagattgatattactccccatattgtggggggcgtacaccttcctgtgatacggtttgtaatatctaggggatatagtgggtgatattactcaccatatcacgggggttgtaacatggtttgtaatatccaggggaggagagggtaatgttactccccatatctcggggcatgtacaccctcctgtgacatggttcgtaatatccaggtcgggagagggtgatattactcctcatattgccgggggtgtgttatggttcataatatcctggggaaggaggctgctatcactctccacatcttgggggatgtacactctcctgtgatatggttcataatatccagggtgggtgagggtaatattactccccatatcgcgggaagtgtacatacccctgtaatattgtttgtaatagaagagagggtgatattactccccacatcgcgggtggtgcccacccccctgtgatatggtttggaatatccagggggatgaggagggtgatattactccccatatctcggtgggagtacatccctctttgatcaagttcataatatccaaaaggaaacaggagagtgatattactccccatatcgccgggggtgtacacgggagggggagtacacccccggcgatatggtctgtaatatccagggaaggagaggagggtgatattactcaccatatcgcaggtggtctacatttacctgtgaaacagtttgtaatatccagggggggaaatgagaatgattttttttttttgagtctcactgtgtcacccaggttggagtgcagtggcacgatcttggctcactgcaacccccgcctcctggactcaagcaattctcctctcccagcctcctgaatagctgggactacaggcgcaccccacaacgtctggctaatttttgtatttttattagagacggggtttcaccatattggccaggctgatctcgaactcctgaccctgtgatccatccgcctcggcctccaaaagtgctgagattacagatgtgagccaccacgcatggcccaaggagaacgatattactccccatatcccagggggtgtatatccccctgtgatatggttcagaatatccggaaggaaagacagggatattacttcccatatcgcaaggggtgtgacatggttcgtaatatcccatgggggagagggtaatattactcttcgtattgtgaagggcatacactcccctgtgatacagttcataatattccggggagtagaggaagatattatgctccatatcgcgggtggcataagccccctgtggtttggttcataatatccagggaggagagggtaatattactccccatattgtggggacgtacaccctcctgtgatatggtttgtaatatcccagaggggagagagtgatattactccccatattgcagggacatacacccccctgtgatatggttcaaaatgtcttttttttttgaaggactggttctttatttcaaaaagacacttgtcaatattcattatcaaaacagttgcactattgatttctctttctcccaatcggccccaagtagaccacatcaaaggagagtacatattaagccaataagctgtaggatgtacacctaacagacctcctagaaaccttaccagaaaatggggacagggtagggaaagaaactttaaaagatcaacaaactgccagcccacggactgcaggggctgtcacagccagatggggtggccagggtgccacaaacccaaagaagcaaagtttcaaaataatataaaatttaaaaagttttgtacataagctattcaagatttctccagcactgactgatacaaagcacaatgagatggcacttgtagagacagcagcttcaaactcagaaaagggtaatgagatgagtttcacatggctaaatcagtggcaaaaacacaatcttctttctttctttctttctttcaaggaggcaagaaaagcaattaagtgctcacctcaacataaggggaacatgatccattctgtaagcagttgggagggggtagagatggaacaaaattttggtctcagaggtcttgccatcttaatttggtcacttctaatgaaaaaaataaaaaatagaaataacattatccaaaggtatcttaaagctgaaaacttgaacagcacattttttgttgttgttgtttggctaactcctcctggaaccacctttctggcttagctagtactttgtacagagcaatgaggcttcccatagtggagtctccctgggctctgtttggctctcagcaaggcaggcctataccttttcctctcctccatggagagaggaatatgcattaaggtgaaaaatcaccttccaaaagtgagaaagggattcgatcgctgcttcagggctgtggtattatatggaatgttttacaaaaggttgctacaaaacaacaaaagaggtaattacaaaatgtgtacatcacaacatactttttaaagacattatgcattgtgctcacattcccttaaatgttgtttccaaaggtgctcagcctctagcccagctggaatctccgggaagaggcggacagtttggtgaaaaagacacagggaaggagcgggcggcggaaggagggggcggcgaaaggagaaagcagccttccagttaaagatcagccctcaattaaaggtcagcttcgggcaggctggcctcaggcggagtctggttcagagggaggagcagcagcagggtgagactgaggcgttctacatctcattcaggtcaagcagagtctggtccagcatcctttgtgtacagaggtgctcccctttggtgcatttcagtttatcttccaagtcatcaattgtcttttccagcttggctaccgatctctcagcaaactcagcatgggtctccgcctcctttattttatcagtaagaatcttgatctcttcctcatatttgtcttctttttgagagtacttttcttcagcagcactcagacacttcaggttctggtccatcagtctaatctgctcatccatctctcggcaaagggattctgccagctcagctcgttcctctgtgcgttccaagtctccttcaatgatcaccaacttacgagccacctcttcatacttcctatctgcctcttctgcaatgtgcttagcttctctgagttggatttcctggagttccatcttttcttcatcttttaaggcccggttttcaataaccttcttacctctctcactctcatcagcagctttttccgcttcttccagcttttgcagggcagtagccaggtgctcctgagcacggtccagctcctcttcaaccagctggatcccacgttcaaggaggccacctcagcctcagcctgttcccgggcccacctttctccctcaacttctcgctggaggcgctcagctcgctcctctgcatcatctgcctgctgctgcagaacctggatcttgcgcttcaccgcctcgatggtggtgatcccagccatggtgcccacccagctactgctagagctccggttcctgcctcctccgatcggcgttgcagcctcctctcacccttacttccgcctcggttcaaaatatcttaagggaaggagttgatattactccccacatcacgggaagtttacatcccctggtgatatggtttgtaatatcccagggtggatagggtgatattactctccatatcgcgaaggagtactcccccctgtgatatggttcataatatccttggggggagagtgtgatattactccccatatcgcgagggccatatactcctttgtgacatggttcgaaatatcccggtgggggagggggtagagggtaatattactccccatacagcgaagagcatacgcccttctgtggcaaggttagtaatacttcagggaaaagagtgcaatattacttttcatattgcagggaacatacactcccctgtgacatggttcgtaatatcccgggggctgagagggtgatatttctccccatatcaccgggggcctacacctgggtgtgatatggctcataatatacagggagggagagggtgatattactccacataccgagtgaggggttacacaccctcgtgacatgttcgaaataccccaaggaggagacaatgatattactttccctgtcgcgggggctacaccctcccagtgatatggttcacaatatcccggggtggagagggtgatattactccctatatcaccggggggtgtacacttccctgggaaatggtttacagtatccccggggggagagggtactattactccccatatcacgttacatatcagggtacacccccacgtgatatggtttgtaacatcccaggaggaagaaaatgatattactccccatatcgcggtggcatacacccctccccgttaaatggttcataatatcttggggtggagagggtgatattactccccatatcacgtggggcatacaccccactatgatatggttcataatatcccggaggggagagggagatattactctccatgtcgcggggggcatatacacccctgtgatatggtttgtgatatcccgggggcggagagggagatattactctccatatcgtggggtcgtacacttttctgtgatatgattcgtaatatccagacggggagagggtgatattacttcccatattgcgggggcgtacacccctctgtgatatggttcataatatcccgaagaaaagagggtgatattactcctcatatcgcggggaacacacaccaccctgtgatatggtttgtaatattcagcgggggagagagtaatattactccctgtatctcggatggcgtacactcccctgtgatatggttcataatatccagaagaaaagagggtgatattactccccatattccagggaatgtacaccaccctttgaatatggttcgtaatatccaggaggggagagggtaatattgctcccaatatcgaaggaggtgttatacggttagtaatatccagagaaggagagggtgacattactccccacatcgtggtgggtgtgcacccacctgtgatatggttcataatattcaggttaagagaggtgatattgctttccatatcgccaagggtgtacactcccgtgaaatacagttcgtaatatccaaaaggggagagggtgatattactcccatatcgtggggggtgtacacccctctgtgatatggttcataatatccagggtggaataaggtggtattactccctgtatctcggggcatgtacatcgcctgtgatatgattcataatatccagaagaagagagggtgatattaatctccatattgctgggggtgtacaaccccctgttgtatggtttgttacactgagttggggagagggttacattactctcaatatcgagtggggcatacacacttatgtgatatggttcataatatcccagggaggagagggtgatattactccccatatcgcgggaggcatacaccccaatgtgatatggtttgtaatatctacatttttttttttgagacgaagtctcgctcttgtcccccaggctggagtatgatggccggatctcggctcactgcaacctcagcctcccgggttcaagcgattctcctgccttggtcccccaagaagttgggattacaggcgcacaccaccacgcccggctactttttgtatttttagtagagaaggggtttcaccatgttggccaggctggtctagaactcctgacctcagatgatccacctgcctcggcctcccaaagtgctgggattacaggcgtgagccactgcacctggcctggtttgtaatatctatgaagggggaaggtgatattactttccatatcacgggaggcgtacaccacgatgtgatatggtttgtaatatccagggggtatactgggtgatattactccccatatcgcggggagtgtatacccttttgtgatatggttcctaatattaagctgaggagaaggtaatattactccccatatcgcaggggtttttatatggttcataatattcaggaagagagagggtgacattactctccatatcacggggtgtgtactcccccatgtgatatggtttgtaatatccagggaaggagaggttaatattactccccatatcgcagggggtgtacacctctctgtggtttgtaatatccaaagggaagaggatgatattatcttcaatatcttggggggatacagtccccagtgatattgttcataatatccagagggggaggggatgatattactcccaatattgcaggtggtgtacaaccccctgtgatattctttataatatagagggggatgatgatattactcccaatatagtaaacaacctgtgtgtacaccccctgtgatattgtttataatatccaagggtggaaaggatgatattactcctcatatcgcagggggtgtatacccctctgtgacattgttcctaatattcaggggaggagaagatgatactactcctcatatcacaggggatgtacacccccctgtgatacttttggtaatatccaggggaggagaaaattatattattccccatgtcacagagggtgtacaccccgctgtgatagtgttcataatatccaggtgaaaagaggatgatattactccgaatatctcaggaagtgtacacccttctgtgatattgttcataatatccaaaggtggagaggaggatactactccccatatcgcagtgggtgtacacccccctgtgatatggttcataatatccaatgtaggagaggatgatattactttccatatcgcggagagtgtacatccccctgttatattgtttgtaatattcagggagaaagaggatactactactccccatatcacacggggtgtatattcccctgtgatatggttcctgatatccaagagatattataatcctctcttggattatgctacctctcatatcgcatggggtgtacacacactttgtgatatcgtttgtcatatccaaggagggagaggattatattaatcccaagatcacggggggtgtacaccctcctgtgatattgtttgtaatattaaggggggagaggataatattactcccaatataattaacaccctgtgtgtactcctccttgtaatattgttcataatatccaatgggggagacgatgatattactttcaatatcgcagaggatgtacatccctttgtaacaatgtttgtaatataaaaggcaagagaggatgatactacttccaaaattgcaggacatgtacaccccccggtgatattgttcctaatatccagtggggaagaggatgatagtagtcccaatatcgcaaagggtgtacacaccccctgggatattgttcctaatataaaaggaggagaggatgctattattcccaatatcacagaaggtgtaaaatcccctgtgatattgttcgtaatattcaggaggggagaggattatattactcccaatatcacagggtgtgtacacagggaggggcaagggccagaagcgggcgggaatccccatgtttgggcggacccagtttctaatggccagcatttgccaatcaaagcttaccagagaactctaaaagccagggctttcctgctagacaagactcatttctggaactgctttaaaaagaaacaaaacttcccaaggaccccttttcctctctgtctgcctaaaataatgttttaaaaactcctaaagcagctgaattcagcccccttcctgggggaatgtatagacggaactcccacctttcccggcatcccaaggccagagtatgtgaaactcctgggtctctatgtgtgtctgagcggctgctctgccaacactccacacagccctgtgtcctggacccaaggcccttatgacctgagctcaagaggggatctcctgatccatgggttgcaaagatccatgggagaagcatggtttctggggcggggtcacacgctcagtcactgtttccctcggatgccggagatggttcctttggctctctgccaatacagggtgaatcatcatccatccctcttttctttgttctcccgggtcaagttgtttgcctagtcagtcccaatgtgagaacctgaatatttcagttgacgcgctgacttcaaaatccccgggcttcgggaggcggagcttgcagtgagccgagatcccgccactgcactccagcctgggcgacagagcgagactccgtctcaaaaaaaaaaaaaaaaaaaaaaaaaaaaaagtccccgggcttttcttttcactcagtggaaggcagctgcttctaattggccatcttggcccgcccccaccacgtgaccttctgtaaaatgcctccactctccaggaacgctctcattatataactttgcctgaaaccaacagcacgctcattgcacatatcatgggctcatttatttcacttataaagaacctggccaaggaagagatagtgcctaaagtggccagtattctgaccgatatgttagaaaaatggtgtgccgaccaattcatgacatgtgtcccaaaactagcaacggaaattgtattcgccgtgttgaggtctctaatccagatgatgctcatctatgtactggaaaaggcagagtcctttcctgacaagctgctgaaactcttcagaaacatctcatatttcctgaagaagatgatgtctggacaagcagcacaggtcgttcagatttaactttctattcatatatccagcacgatattcgcacaattgtcacgaaaccttaccagttgatgagtcctgcacatttcctttaatttcaggaggaagagggtaatccggatgagttttctgacctactctgctgctgtgattaaacaaccaccaggaaattttgacgacactgttctcctgagctcctccctttcctccgggaacaaaacaattgaatttacaaaaataaagtgttatttgactggagtgaggtctcatgtctgcttatgcggtggctcgctgctcagaacagggtgagtctctgggttgtgtgctgaggaggggaggctctcaatctggagaaaacccactgcaggggacacctccatggggtctgagggactgaggatgaggagccggactgggtctagggaaggaggaggtttcagagggtgaaattctggcactaaagcctgggggtgtttgggaacttcctccttccgaagaagtttcagggagggataaagacaaaccctgggctccttgaggggcccttactaatttgagaggactctatcgggaaggagagtgacaatggcctccttgaggactgaggcccctgaataaatgaggcccagatacagtccatgggggatgagaccttcaagggtcacattttggttgggacagaggaaaagtgcagctctgcagccgcagaggaaaacccggcagtgtgaaagcgaccttggaggggccctgtgcgctctgaatgcgtctgagcccccatcccctgtccccgcctctctttctggattcttccagctcggctgtctccgccatcttctgagcgctccaccctgacttattcaagtttcccttctgccttccaagtactccaaaatctttcagatctgtgtccctacccctgtttttagcatgtgttggggctccaggtccctgaaggtttctggcctgaaatccacctccccagcggagtggactgcgttctagagactccacactccgcgaggttcccaggcccctgagggacaaccgagtggcctgcgcacttcagggctccacactcggcaaggtctttcaagcccttggggtccccttcttagttttttccacctttctgggctgcagtcactccataaatgctgggatctgatccccacccccactctcgtttcctcaattctgcgggctacacgctctggcaaggtcctccgggccctggatcccctccctctccctatgcccacgctcctagtcagcccttctggggtccactattttcaggaactaaccgttctcatggagccttgctaaccggaaagctgtgtggaagaaaggctttgaggatagaggtggagatttggctcttccatagtgccactcacccaccccaccatgctgccactgccagacccggacccctgtttcagaacaagtgaccagattcgctcctggacagccctggacactggccttttctctgaaaactactcaccctttctctagtccccacttcatgccagcctcataccctcttccttcccccacgctggcttccgggatcctcctctgctcagacaacctcttctgtgtcccacccccgtttttagaatgctttggggcaccaggttgggggaaggtttctggcctgatatccatctctttccaaactcccttcttcccttgaaaggcttcttgccttcagccccacttctggctccgaggtttcaggacaccctcctcttcatcctcattcttttgaccaccagctttttaggaattcgaacgtccctctcatcttcgtgaatcctgtccaggcatttgttgaccccttcatctgatacccctgacctcacattgccaaaagtctacccctacccagtacactggaattagacaaaatcccaggagttttacctcaactctgagtgtgcccacaggagctctccctgaagccacgtccttttaagcagggtctagggttcctcccttgtcttaatgaactctttgtcacacggaggacgttatggagcccttatgatctttcactgcctttctgcccagcgttttgtctttccatggacatttataatattttccatggacattttgttctctcaatgtccacccctaatttccaacatcccaaagattctcatgtgtttcctgaaagccatttacaggaatggctgtgcccagacccccttccccaggatcctccttcacacctggtaggtgcctctcctagagagatttgcactcagttgtcgtgcagtcacatggcccagatggttgttaatcacccccttcctggcaacagctagcagccagggaatcactggcacagaaacctcagggtgaccaagatgaggccacctctgtgctgaaggctgtgctccagagcctgcttgggatcaggcttaagcaggtcttcagccagacctgatgttacctggtttccttgagctgccctgcctgagctatcgggagcactccctcaatgcacatcttgattccctatctcatgctctgcttctagaaaccatgagctatcaattgctactggcaatggtcctgggaagtcaaccctaagtatggattctggggttggatgactccccacaggacttcagtgagcaacaatcactgctggcagttggaggacagagtcgctagggcatgtgaccactgtgaaaccaccgatgtttcacctggggtaattttggatgaactacggtagaagcactgaaggtacattgcttttggtttggaagattgtaggtaaataatagcgatatgaatgtggaattggatggctgcaaacgagtgccattgatgcattgaaagaggaaaagtcaggctgtcacctgtcactcagcaatttaaagtgtgagagttgggactagatgtggtggctcacatctataatccagagattcgggggaagcttgaagaggtaggatcttttgagtccaggagttccagaccagcctggacaccagagcaagacctcatctctacaacaaaattttcttaaaaattagatgggcttggtggcacgcacctgtacttgtagatctagctaatggggagcatgagataaaaaaatcacctgagtcagggacttaggggttacaatgaggtatgattgtgccagtgcacacactcccacctggccaacagagtgagattctgcttccaaaaaaataagaaataaatcaggtttgagagttggaaagcatcatcttctcctagagccaaaggacatgtacaactgagacccaggaacaaagcttcatcacaaagagaccatcatcagtggagccgggagatgcattccccctcaccctgccttgaggaggcagtggagtcatctgtctgggatcctttctgacccagccctatttgtttgtctctttggcttctttggatttgtatattttagctgttataacactgtaaaacaaacagagtgatttttttgagttgtgtgaatgatgctagctccatagtcaccctgagagtgatgggaacttttgaatttgtggcaagttggagggtagtgtaagtgacctgagattgccaaattggggctagcactggatgtgaggttaggctagtggaaaaatatgcccagaaccagaggagtgtgggctcactgcaggtggttaggctcagatccaaattgtacagatggatagctttggggtaaagaataacatagttgagaagtgcatgtgttagtctgttcatgcactgctataaagaattacctgagactgggtaattatttataaaactcaggtttaattgggtcatggttccacaggctgtacaaaaagtatgatgctggccatcagctcaacttctggggaggccccagaatagttagagtcatggcaaaaagtacaagggaagcaggctcatcttccacggccagagctggagcaagtggtaggagaggtgatacacactttcaaacaagtaggtcttttgagaactccatcaccggacagcacctatgggatggtgctaaattattcatgaaatatccgcctccataatccactcaactgtcaccagcgcagccagccccacctccaacagtggggattacaattccatatgaggtgtgggtggggacacagctccaacctcaatcagtgggcatcctggattgggtctactatagaaggagaaccaggagctgactatgatcttgaaccctacccatgatggccgggcggggtgactcatgcctgtaaccccagcactttgggaggctgaggtgggtggatcgcctgaagtcaggagttagagaccagcctggccaacatggtgaaaacctgtctctactaaaaatacaaaaaattagaccggcgttgtgctggatgcctgtaatcacaccactacgctccagcatgggaaaaaataccaaaacttcgtctcaaaaaaaaaaaaaaaaaaaaaaaaaaaaagactgcccatgaccactgcaccagtgagagggacaccagcatcactgagatgcaagggctggacattcttcataggtcagagctcaaagcaggggacactgatacagagatgggctccatccatagcaccaaagtggtgagaggatgtgggaatggcagaggccagcactttgccatcaatgcaagggggtataaggaggtgacaccagtgccagagtacatcacggggggactgccctacaatatctaggacttacctcttagagcgtgtttcattagcgacaacagatataaatggcagacaggtgtgtccctgcattaacaggaaatagaaatcatcaagaggaacagaaggcagatgtcagcagccccttagaaagtcatcatccttcatacagttaaaatctgagacagttctcacacgagaaggcctaactcaaaaagaggctgggttctcatgaggcaggtttatgcaaaaccaaggaaggtgtacaagtttggaattctccagtttcccttggaaaagacctacagtcatttgcttaggtaactgagcactgaacaaaggtgagtattgttgtcttttagaagctcttggccaagaaggccttgttggcataaaacccatggtttggaaacatcaccatgacccctgttagagtaatggcctaagggtgggggtcaggaaattgatgtattccttgccaacttctgcctctaagtgagtgaactctgtttgtgaacctctctcctctgtggttatgttcctaggctctcatgtataatcaggagtcatagacttagaaacaggaaaaatacttacagtgtttttgtggcctgtgagctatgacttataattttaggaaaaaaacaattgcaaatggaaagcctaagtctatcaatgctcatccaagacaacataatcaataaaaaccaatatcaaatctcaaggcaaattatttcctgtatatagatggcagagatgagcaccaccatcaaaaactcaaggaccagtgctgtgggtccagtcatctgtttcatggaattcaccagtctggtatcttcaaaatccagaaggatgatggcagatggcaggaaagtaatgcaaacgtcatcaggtgtgaccccactgtagcagctgtgatggatgttttctctcaccatagcaataaataacacaacctcggtcacactgtatgcattgttggtctgcaaaatccatgttttgcaaaactcttcaggaaggtggatctgtaatattggcattgacatgagaacaacagcagtatttattcacaatctcaagctctctgtcttcccgtctctctcattagccatccaagtagtcctgaggaaccaagcccatcagaacattctgcaacataatacacagctccattctccattcaaattttgttgttgttgttgttgttgatgagacaacatcttactccatcagccaggctgacgtacagtggggctatctgggctgactgtagtcttgagcttccaggctcaaggcatcctctcacctcagcctcctaagtggcttgaactacagacacacagcgacatgctgggctagtttttgtatattttgtagagacgtgctctcaccatgttattcaggctggactcaaactcctgagcgtaagtgatccaagcaccttggcctcaaagtgctgagattacaagcctgagccactgcacccagcccaatctccattctactgataacaatgtcattaccaggtctgatggacaggaaatggtaaggtttctgaaaacctaaggatcacacagcgagttccaaaggctgaaagtgcatacctgtcgacactgataccaatgacatccaatggtgagaatgacattccttgtagtcctagctctgctcataacaaatctatactgaagtgtaagagtttgatggtcatggggattttccatgtctctgcctttcagcgatgtgccatatctgtgaagtgttcagaaatgcaacagcctgaggcatgctgggcatatcctctaataaaaaggaaaatgccattttatggtcctgtatttctacaagttggaacacatgggcctgtgatccagatgggggaaatgggaatattcccactcattcaccttcatccacgaagcccatttgaaagctttgggcttcccatccttgtagattttagtgttgtgggctgggtgcagtggctttcacctgtactgccaacactttgggaggcctagacaggtgaatccactgaggccaaaagttcgagaccagcctggccaagatggtgaaaccccgtccctactaaaaatacaaaaattagcaaggtattggggccagcacctgtaatcccagctgctcgggaggctgaggctggagaatcgcttgaacccaaaaggcagagactgcagtgacccgatcctgcctttgcactccacctgggcaagcagaacaaaacttctgtcttgaaaaaaaaaacaaaaaacgaacaaaaaagatgttagagttctgggtttagaggtctataccccagaaagagaatggtttcaacaagggacaaagaagttgctttaaacgttgacttgccatttcttttcagtgtgtttgttctcttgcgtcaagagaccaccagaaaagtggtgcaattactctcctgtcaagaatcattgactatcatctgcaagagggtcagatcctggtatataattagggcagaaatacttagtctgagaagggtatgacatccagaggccctattaatgatgtccttttctccatgcctgactctgaccccatgtgctggactgcccctgtgtggatggcctcatggcctgctcggactctgaggtcccaccccaagtggcacctccatggagggctctactcttgtatgggctctgacactcacactgagacactctcccatggacacctcttcacccacttggggtctgaaactgggctactccatccctccctaacctggaacagagagctttcactgctattacacaagtcatagaggctaactcctcatttttccaagctaattattgaaacattagtcctgggttgataagacaagataagttaacttttcataaatttgcttatcaagttttgaataaattcaaataaattcaccttccccacacaccttagttgtcgacatcacacgcgcacccatactcacagggtgagcacgaaggcttcactgtcagtggagaaagtggcaaaacccttctgtgcctcatcctggtctagacctggccctcatcctttcccactcttcccctcactcccttggattcatccacactggcctcctgcctgctgctccacctccctgcgaagctcacccctgcctcagggcctttgcacgtgcagtggcttcaagccatatcctcttcacccagatctcccagatctcctgaatgatcttcttttatcattcaggtctcagcttgcatgtaatcttctcagtgaggattacccaaaccacatagttcattcattcattcaaatattcattcaatggcatattgacaaagcagctacttcatgccaggccttgggccaggtgttatggatatggcaacaaacaaaacaagagttttctgctctcaaatttttacccacttaaaggagatatcatacatcatctgtaaataaatacatcatctgtaaataatgatgtaaataaatacatcatctgtaaatctgtaaataatgatgtaaataaatacatcatctgtaaataaataaagtataataaaagaaaatagtaggtttttttggttggaggtgaccgtgaagtttgcaaataccatcttacaacacattattttattttatttcatttcatttttaattttattattattatactttaagttttagggtacatgtgcacaacgtgcagatttgttacatatgtatacatgtgtgaagttggtgtgctgcacccattaactcgtcatttagcattaggtatatctcctaatgctatccttcccccctcccccaccccacaacagtccccggtgtgtgatgttccccttcctgtgtccatgtgttctcattgttcagttcccccctatgagtgagaacatgcggtatttggttttttgtccttgtgatagtttgctgagaatgatggtttccagcttcatccatgtccctacaaaggacacgaactcatcattttttatggctgcatagtattccatggtgtatatgtgccacattttcttcatccagtctatcattgttggatatttgggttggttccaagtctttgctattgtgaagagtgccgcaataaacatacgtgtgcgtgtgtctttatagcagcatgatttataatcctttgggtatatacccagtaatgggatggctgggtcaaatggtatttctagctctagatcactgaggaatcgccacactgacttccacagtggttgaactagtttacagtcccaccaacagtgtaaaagtgttcctatttctccacatcctctccagcacctgttgtttcctgactttttaatgatcgccattctaactggtgtgagatggtatctcactgtggctttgatttgcatttctctgatggccagtgatgatgagcatttcttcatgtgttttttggctgcataaatgtcttcttttgagaaatgtctgttcatatccttcacccactttttgatggggttgtttgtttttttcttgtaaatttgtttgagttcattgtagattctggatattagccctttgtcagatgagtaggttgtgaaaattttctcccattctgcaggttacctgttcactctgatggtagtttcttttgctgtgcagaagctctttagtttaattagatcccatttgtcaattttggcttttgttgccattgcttttggtgttttagacatgaagtccttgcccgtgcctatgacctgaatggaaatgcctgggttttcttctagggtttttatggtttgaggtctaacatgtaagtctttaatccatcttgaattaatttttgtataaggtgtaaggaagggatccagtttcacctttctacatatggctagcctgttttcccagaaccatttattaaatagggaatcctttccccacttcttgtttttgtcaggtgtgtcaaagatcagatagttgtagatatgtgacattatttctgaggactctgttctgttgcattggtctatatctctgttttggtaccagtaccatgctgttttggttactgtagccttgtagtatagtttgaagtcaggtagcatgatgcctccagctttgctcttttggcttaggattgactttgcaatgcggggtcttttttggttccatgtgaactttaaagtagttttttccaattctgtgaagaaagtcattggtagcttgatggggatggcattgaatctataaattaccttgggcagtatggccattttcacgatattgattcttcctacccatgagcatggaatgttcttccatttgtttgtatcctcttttatttcattgagcagtggttttagttctccttgaagaggtccttcacatcccttgtaagttgggttcctaggtattttattccctttgaagcaattgtgaatgggagttcactcatgatttggctctctgtttgtctgttattggtgtataagaatgcttgtgatttttgtacattgattttgtatcctgagactttgctgaagttgcttatcagcttaaggagattttgggctgagacaatgggttttctagatatacaatcatgtcgtctgcaaacagggacaatttgacttcctcttttcctaattgaataccctttatttccttctcctgcctaattgccctggccagaacttccaacactatgttgaataggagtggtgagagagggcatccctgtcttgtgccagttttcaaagggaatgcttccagtttttgcccattcagtatgatattggctgtgggtttgtcatagatagctcttattattttgagatatgtcccatcaatacctaattattgagagttttcagcatgaagggttgttgaattttgtcaaaggccttttctgcatctattgagataatcatgtggtttttgtctttgggtctgtttatatgctggattacatttattgatttgcatatattgaaccagccttgcatcccagggatgaagcccacttgatcatggtggataagctttttgatgtgctgctggattcggtttgccagtattttactgaggacttttgcatcaatgttcatcaaggatattggtctaaaattctcttttttggttgtgtctctgcctggctttggtatcaggatgatgctggcctcataaaatgagttagggaggattccctctttttctattgattggaatagtttcaggaggaatggtaccagttcctccttgtacctctggtagaattgggctgtgaatccatctggtcctggactgtttttggttggtaagctattgattattgccacaatttcagatcctgttattgctctattcagagattcaacttcttcctggtttagtcttgggaaggtgtatgtgtccaggaatttatccatttcttctagattttctagtttatttgcgtagaggtgtttgtagtattctctgatggtagtttgtatttctgtgggatcagtggtgatatcacctttatcattttttattgcatctatttgattcttctctctttttttctttattagtcttgctaccggtctatcaattttgttgatccttttaaaaaaccagctcctggattcattaattttttgaagggttttttgtgtctctatttccttcagttctgctctgattttagttatttcttgccttctgctagcttttgaatgtgtttgctcttgcttttctagttcttttaattgtgatgttagggtgtcaattttggatctttcctgctttctcttgtgggcatttagtgttataaatttccctctacacactgctttgaatgtgtcccagagattgtggtatgttgtgtcttttttctcgttggtttcaaagaacatctttatttctgccttcattttgttatgtacccagtagtcattcaggagcaggttgttcagtttccatgtagttgagcggttttgagtgagtttcttaatcctgagttctagtttgattgcactgtggtctgagagacagtttgttataatttctgttcttttacatttgctgaggagagctttacttccaagtatgtggtcaattttggaataggtgtggtgtgatgctgaaaaaaatgtatattctgttgatttggggtggagagttctgtagatgtctattaggtccgcttggtgcagagctgagttcaaatcctgggtatccttgttaactttctgtctcattgatctgtctaatgttgacagtggggtgttaaagtctcccattattattgtgtgggagtctaagtctctttgtaggtcactcaggacttgctttatgaatctgggtgctcctgtattgggtgcatatatatttaggatagttagctcttcttgttgaattgatccctttaccattatgtaatggccttttttgtctcttacgatatttgttggtttaaagcctgttttatcagagactaggattgcaacacctgcctttttttgttttccattttcttggtagatcttcctccatccctttattttgagcttatgtgtgtctctgcacgtgagatgggtttcctgaatacagcacactgatgggtcttgactctttatccaatttgccagtctgtgtcttttaattggagcatttagcccatttacatttaaggttaatattgttatgtgtgaatttgatcctgtcgttatgatgttagctggttattttgctcattggttgatgcggtttcttcctagccttgatggtctttacaatttggcatgtttttgcagtggctggtactgactgttcctttccatgtttagcgcttccttcaggagctcttttagggcaggtctggtggtgacaaaatccctcagcatttgcttgtctgtaaaggattttatttctccttcacttatgaagcttagtttggctggatatgaaattctgggttgaaaattcttttctttaagaatgttgaatattggcccccactgtcttctggcttctagagtttctgccaagagatcagccgttagtctgatgggcttccctttgtgggtaacccgacctttctctctggctgcccttaacattttttccttcatttcaactttggtgaatctgacaattatgtgtcttggagttgctcttcttgaggagtatctttgtggcattctctgtatttcctgaatttgaatgttggcctgccttgctaggttgcagaagttctcctgggtaatatcctgaagagtgttttccagcttggttccattctccccatcactttcaggtacactaatcaaacgtagatttaatcttttcacatagttccatatttcttggaggctttgtttgtttctttttactctctttcctctaaacttctcttctcacttcatttcattaatttgatcttcattcacttatatactttcttccacttcatcaaatcggctactgaaggtattgcatgcatcatgtagttctcatgccatggttttcagctctatcaggtcatttaaggtcttctgtacattgttttctctacttagccattcgtctaatcttttttcaaggtttttagcttccttgtgatgggtttgaacatcccctttagctcagagatgtttgttattactgaccttctgaagcctgcttctgtcaacttgtcaaagtcattctccatccagctttgttccattgctggtgaggagctgcgatcctttggaggagaagaggtgctctggtttatagaattttcagcttttctgctctggtttctccccatctttgtggttttatctacctttggtctttgataatggtgacctagagatggggttttggtgtggatgtcctttttgttgatgttgatgctgttcctttctgtttgttagttttccttcgaacagtcaggttcctcagctgcaggtctgttggagtttgccggaggtccactccagaccctgtttgcctgggtatcaccagcggaggctgcagaatagcaaatattgcacaacagcaaatattgctgcctgatccttcctctggaagcttcgtctcaaaggggtgcctggctgtatgaggtgtcagttggcccctactgggaggtgtctcccagttaggctagatgggggttagggacccacttgagaaggcagcctgtccattcacagagctcaaacactatgctaggagagccactgctctcttcagtgctgtcagatggggatgtttaagtctgcagaaatttctgctgccttttattcagctatgccctgcccctacagatggagtctacagaggcaggcaggcctcattgagctgcggtgggctcctcccagttcgagcttccagaccactttgtttacctactgaagcctcagaaatggtgaacacccctcccccacccagtctgccgccttgcagttccatctcagactgctgtgctagcagtgagcgaggctccatgggcgtgggacccactgagccaggcacaggatataatctcctggtgtgccatttgctaagaccattggaaaagcacagtattaaggtgggagtgtcccaattttcccagtacagtctgtcacgggttccctcatctaggaaaggtaaatcccctaaccccttgtgcttcccggtgacgcaatgccccaccctgcttcagctagccctccatgggctgcatccactgtccaaccagcccaatgagatgaacaaggtacctcagttggaaatgcagaaatcacccatcttctgtgtggatcaggctgggagctgcagaccggagttgctcctattcggccatcttggaatggcaatctatgtttgctttttacatttgaaaaaactggtgtcacgtacctaggtattaatcattgtggtatcctcttgccgatttacctctttatcattaactagtgaccctccttgtcttttgttgttacagtctgtgattttagtctattttatctaatatgagaatagctactctggcacttttttggtttccagcttcatgaaatatccttttccatttccctgttttcatttccctttcggtgtctctatagatgaagttgatttctttaaggcaccataagttgggtcttatttctttatccatttgaccatttagagaatttagaacactgtcagtgttattattcataagtaaaaacttaagagtgggtgtagtggtgtacatctgtatttcctgcactttgagagactgaggcgagctgatctcctggggtcaggagtttgagaccggcctggtcaacatgatgaaaccctgtctctactaaaaatacaaaaattagccaagcatgctggcatgtgcctgtaatccaatttacttgggaggctgaggcaggagaagcttgaacctgggagacaaatgttgcagtgagctgagatcacacagagaagtcatctccactctcctcatcagaacctcttgttcacagcatttgtgagcacaaatcaatgatggttattctttcctactaattagggatattttattacacagcaatagcctccagcaaagggaaccatcatacatgattcctacaagttgacagggctggaattatcactgaaaaactaaggtggctatacttgattcccaatgtccaatttttcatgaatagagaaatttatcctttttccccccagccagaaaccaagttttgctcttacgcccaggctggaatcaagtggcacaatctcagctcactgcaacctctgccccccagcttcaagaaattcaccttttgaacaaggagatattaaggatacactatgtgtatgctaccggtggttgcaggagactcagaaaagagagaaacagtcactggcctcgtgcaactgatattctcgggaggagagaaaggcaatcaagaaagaaacatgctgtatttcagacagctgtaagtcctccacaagaaaagaaagcaggtgaggaacataggaaatgtgtcaaccataaggttcccgctaattctataagttggtcagggatatcctccaagaataagcagcatctgagcaatcacctgaagggaggaaggaaggaagactgtgagtggtggcttacacctgtaatcccagcactttgggaggccaaggagggcagattgcctgagctcaggagttcacgaccactcagagcaacctgttgatacccaatctctactaaaaacacacaaaaaaattacccgggtgtggtggcacgcacctgtagtcccagcttccatgcccagctgatttctctctctccatatatatatatatatacacatatattgtttttgcagagatagggtctcactgtgtcacccagtcatcaagcaattctcttatactgttttggaaaagcatgggaattacaggtgtgaaataccctgctggtcctgaaaaatgtgatatttgggattctctgcctggcttgttttacccaaaataatgacctccagttccttccaggttgctgcaaaagacatgattttcactgttttataactgaatagtattcctgtatgtatacataccacattttctttatttattcttctgttgattgacatgtagggtgattccatgtctttgctactgtaaataatgctgcagcaaatatttgtgtgcattttgatctattcctttgagtaggtacccagtactgcaactgcaggactgagtagttgttatattttttgttctttcagaaatctccatagtgtttgccataaaatctgcactaatttacattcccaacaacaatgcataagatttccccttttctccacattctcactaacatttgttatgtttttgtctttttcataatacccattctgactggagtaagatatctcattgtggtggttgttgatatttttgagacggggtctcactctgttgccagactggagtgcagtggtgtgatcgtggcttgctgcaacctccacctcccgggttcaagcaattctcctgcctcagcctcccgagtagctgggactacaggcgcgtgccaacaggcctggctcattttttgtatttttagtaaagacagggtttcaccatgttggccaggatgatcacagtctcttgagctcatcatacacctgcctcagcctcccaaagtgttggaattacagtcatgaggcagcgcacccaacctcaatgtggttttaatgaccatttctctgacgattcatggtgtggagaatttctttgaaataccttttggccatttatatgtgctcttttaaaaactgactcctgtccaggtgcggttgagcatgcctgtaaccccagaacttcgggaggctgaggccaatggatcacttgaggcaaagaggcagaaatcagcctggccaacaaggcaaaaccccatctttactaaaaatacaaaaaatcagccacgggctgtgactcgtgcctgtggtgcaagttactcaggaggttaaggcacaggaattgcttgaacccggtaggcacaggtcacagtgagccaagatcatggcactgcactacagcatgggtaatagagaaagacctgtctcataaaaacaaatgaataaataaataagataaaaaataaaaaagtctctttatgtcctttgccgactttttaatgggattctttggagttttctgttgtagttgagatctttgtttactctcggtattagtcttttgtcaaaggaaaagtttacaaataatttcttccgttctgcagtttgtctgctcactctgttgagaggattatttctttggctgtgcagcagctttttgtttcagtaaagcttttgaatttatataattaaaattttcagtttggtttaaatttgcactggtcgatttttggttttgttgcctgtacttttgaagtcatactcttgaactctttactagacaataaccagaagagttttctctagttttcttctcacatttttattatttcagtacatatatttaagtctataattcatcttcaattgatttttgtagaaatagtgagaaataggagtccaggtttattcttctgcaaatgacaattcaattgttccagcaccaattattgaaaagggtgtgctttcctcaacgtatattcttatcagctttgtcaaagatcagttggctataaatgtgtggctttctttctgggctctctagtctgttacatcaatctgtgtgtctatctgtatactactaccatgctgtattggtgatgatggctttgtaatataatttgaagtcaagaaatgtgatgctcccagctttgtttatttgcttcagaaaggctgagtcaacagctgcagagatgaagctgcccctcctcgcagggctccttcccggaaaaagatcatggctcccactgaccatataaccatggctggaactcctgaaattcccaaagggaggccctacccagtgaggggggatgaatgaaggtcctacttaaggaatctgtctggccacaatcaggcacagcagctgtgctgccttgtgggggaccagaccacctggattccctggagcctgcaggctagaatgtctgagtccatggaaacacagaaatggaggccgccctcacctccccagaaaactgtagtctcaggcagtctccagccgattgccactggttggctgctattccaagccagtgggtcttaacttgagaggtgctgtggaagtggggcccacggaatgaggctgcttggctccctggattcagccccttttctaagggaatgtacagatggaactcccgccttgcccagctttccaagtatataaaactcctgagtctctgtgagtgtctgagcgagtgctctggcaacattcgacacggctctgtgtatctgacccaagacccttatggcatgagctaatgggaggatcttctgatccatgcgtggcaaagatgcatgggagaaacatggtttgtgggtaggggttgtgcattcactactgcttctcttggctgtaggtgaaggtttctttggctctgtgctgatactgggtgcaccatcacccaccccctttgtttcttctcctgggtcaagtcatttgcctaatcagtcccaatgtaggaacctggatacttcagttcaaggtgctgaattcaccgtgcttttcattcaggggaagacagctgcttctcattgggcatcttggcctgcccacttcacgtcactttttgtaaaatccacaccactccaggaatatccattacttaacttcgcctgaaataaacagaaggctcattacacttatcatgggctcacttacttcgcctataatgaaggtgccatggaaatgctagtggatgacgtggtccattttcttagggatgagatagaaaaatggtgtatggctttttaatttaattaaaatttttagtttggtttaaatttacattggtctctttttggttttgttgcctgtacttttgaagtcttactcgtgaactctttactggacaatgaccagaagagttttccctaagtttcttctgatattttgaccatttcagtacatacatttcagtctataattcactttaaattgatttttgtaaacatggtaagaaataggagttcagatttattcttccgcatatgataatgcaactgtcccagtaccaattattgaaaagggtgtgctttccctagtgtatattcttgtcagctttgtcaaagatcagttgcctatgaatgtgtggctttcattttggattctctcgtctgttacatcaatctgtgtgtccacatttatacctgtaccatgctgtattggtgactatggctgtgtaatatattttagagttaggaaatgtgatgctcccagctttgttcatttgcttcagctgaaaaggttgagtccacaattacaaagatggcagccgcccatccccggaggacctccaacccagaaagagatcaggcttcccaccaaccctataaccctggctggagttcctgaaattccaacagggaggaccttcccagtgaggagggatgaatcaaggtcaaatttaaagaaacagtctggccactatcaggcacagcagcagtgctgccttgtgggggacccctcctgctccagaccagctgccctccctggagcccgaaggctagattgtctgagtctacggaaacagagacggtggccgccccaaccacccagaactcggtagtctcaggcacttggcttgctatcttgccactgcttggctggtattccaagcccgtgggacttgagaagtgctgtgatgatggggaccacaggatgaggctgtctggctccctgtgatatggctgtgatgagtggaggaacaccagggctcatgtctcacacagaattggagaaaatgacacaaacacatgtacagtggttttatggcgtgcagtttaataggcaagaacgaaggaagagctccccatactgagacagagggaggggggctccaaagccaaaagaggaaacccggagtgctgtggataccaatgagttatatgaagaaactggagggggcggtgtctgatttgcatagggttcaggcgattggttcgaccaggcatgtcatttatgtggcccacggaaaaactggccctcccacctagcctttgaatatgcacgtgccggacaccctgatttcctacactcatggggatatatgggggtggccatatcgccaggcacaggtggggacaagggccagaagagggcgggaatcgctatgtttgggtggacccagtttctaatggccggcatctgcagatcaaggttaccggagaactctaaaagccggggctttcctgctagacaagactcatttctggagctgctttaaaaagaaacaaaacttcccaaggaccccttttcctccctgtctgcccaaaataatttcttaacaactcgtataacacctgaattcagcccccttactgggggaatgtaccaacggaactcccacctttcctggtttctcaaggctagattgtgtaaacctcctgggtctcggtctgtgtctgagcagctgctctgccaacactccacacagccctgtgtactaggcccaaggccgccgtgactcagcccatgggaggatctcctgatttcttggttgcaaagatccatgggagaaaaatggtttctggggcggggtcacacactcatggcttctcttggctgtgcaagaaggttcctttggctctgttccaatatagcgtggttcatcacccacccctgttttctttgttctcctgagtcaagttgtttgcctagtcagtcccaatgtgagaacctgaatatttcagttcacgtgcttatcgtgaaattcactgagactttaattcagtggaaggcagcctcttctaattggccatcttggcccgccccctccacgtcacctcccataaaatggccacgctctccagggacgatgccattatatatctttacgtgaaaccgacagaacacttattacactttttgtgagctcatttacttcacttataatgaacatggccatggaaatgctagtggagaaagtggtcgattttctgatggatgtgataaaaaaatggtttgccgaccaattaatgacatatgtctcaaaactagtaacgagacccttaatcgctgggttgaagtttctaatcaagaagatgctcatctatgtattcaacaaagcagcttcccttgcttctgaaatgcttccaaacaacatctcatatttcctgaagaagataatgcctggacaagcagcacaagtcattcaggtttactttcagctcataaatccagcaggatattcgcacaattgttgggaaaccttatcagttcatgagtcgtgcatgtttcctttaatttcaggaggaagagggtaatctggaagagtttcctgacctactctgctgctgtgattaaacaaccaccaggaaattttgatgacactgttctcctgagctcctccctttcctcggggaagaaaagcattgaaactacaaaaataaagtgttatttggctggagtgaggtctcatgtctgcttatgcggtggctcgctgctcagaacagggtgagtctctgagttgtacgctgaggaggggaggctgtcaatctagaaaaaacccattgcatgggacacctccatggggtctggggggctgaggatgaggagctggactggatctagggaaggaggaggtttcagagggtgaaattctggcagtaaatcctgggggtgtttgaaaacttcctccctcagaaggagaagactcagggaggaataaggacaaaccatgggtcccttgaggggcatttactaacttaagaggactttatcgggaagcagagtgacaatggcctccttgaggactgaggcccctggataaatgaggcccagatccagatccagtccatgggagatgagaccttcaagggacatatttttgttgggacagaggaaaagtgcagctctgcagctgcagaggaagccttggcagtgtgaaagcgaccttggagggggccctgtgcgttctgaatgcttctgaggtccatcccctgtccccgcctctttttctggattttttgggctccatggtctccgccatcttctgagcgctccacgctgccaccttcagttttctcttctgggctccaaatactccaaaatctttcatatctgtgcccctacccctgtttttagcatgtgttgggactccaggtccctgaaggtttctggcctgaaatccacctccccagcggtgtggattctgctctagagaccccgcacttggcaaggttcccaggcccctgggggacaaccgagtggtatgtgcacttcagggctccacactcggcaaggtctttcaagcccttggggttccctcctcagttttcttcacatgtctgggatgtagtcactctataaatgccgggatgtgatccccaccccagtgattttttttagttccatgagtgttgctatctgaatagtcatcctgagagtgatgggaccttttgaatttgcagcaagttttagattagtgtgagtggcctgagatcgcaaaactggggctagcattggatgtgaggttaggctggtggaaaaatttgcccagaacctgaggagtgtgggctcactgcaggtggttaggatcagcacagaattgcaaggatgtatagctttggggtaaagaataacatggttcagaagtacatgtattagtcttttcatgcattgctataaagaattacctgagactgggtaattaattataaaaactcaggtttaattggctcatggttccacaggctgtacaaaaaggatgatgctggccatcagctcaacttctggggaggcgtcagaaaacttagagtcatggcaaaaagcacaagggaatcaggctcatcctccatggccagagctggagctagtggtaggagaggtgctgcacacttttgaacaatcagatctttttagaactctatcaccagacagcacctagaggatggtgctaaattattcatgaaatatccacccatatgatccactcaattctcaccggcccaaccaggaccacctccaccattggggattacaattacacatgagatgtgggtggggacacagatccaaactcgatcagtgggcatcttggactgggtctactatagaagaagaaccaggagctgactatcatccttaagactgcccatgatggccaggcagggtggctcatgcctgtaatcccagcactttgggaagccaaggtgggtgaatcccctgaggtcaggagtttgagaccagcctcgccaacatggtgaaaccctgcctctactaaaaacacaaaaaattagatgggtgttgtgccagacgcctgtaatcacagctactccagaggctgaggcatgagaattgcttgaacctgggaggcggaggtggcggtgagccccaatcgcactgctacactccagcatgggcaacaataccaaaacatcgtctcaaaaaaaaaaaaaaaaaaaaaaaaggctgcccatgaccactgccccagtgagagggacaccagcatggctaagatcaagtgctggacattcttcatgggtcagacattaaagcaggccacactgttacagagatgggctccattcatagcaacaaagtggtgagaagatgtgggaatggcagaggccagcactttgccatcaatgcaaggtgggcataaggagctggcaccagtgccagagtgcatcaggggaggactgctttgcaatatctagcacttacctcttagagtatgtttcattagggacaacagatataaatggcagacaagtgagtcccttcagtaacaggaaatagaaatcatcaagaggaacagaaacagatgtcagcagccctcatataaagtcatcatccttcatccagttaaaacctgagacagttctcacataagaaggtctaattcaaaaagagactgggttctcatgaggcaggttcatgcaaaaccaagggaagtatacaactttgggattctccagcttcccttggaaaagacctacaatcatttgcttaggtaactgagcactgaacaaaggtgagtattgttatctttcagaagctgttggccatgaaggtcttgctggcataaaacccatggttggaaacatcaccatgacccctgttagagtaatggcctaagggcaagggtcaggaaattgatgtattccttgccaacttctgcgagacgagtgttggtccactcatctctttcacggaattcaccagtctggtatcttcaaaatccagaaggatgatggcagatggcaggaaactaatgcaaacaccatcagttgtacctccactgtagcagcagtaatggatgttatctcttcattgtaatatccagggagggagaagatgacattattctcaatattctaaacaccctgtgtgtacagcctctgtgatattttttgtaatatccgtgtgggagagaattatattactcctaatatctcaggggttgtgccccctctgtgacaatgttcctaacacccaggaggggataggatgatatcacttttagcatcacagggggtgtacaccccactgtaatattgttcataatatccgggggggagagaatgatattactcccaatatcgcaaagactgtacaccaacctgtgatattatttgtaatatccataagaggaagaataatattactcccaatgtcacaggaagtgtacacccttctgtgatattgttcaaaagatccagttagggaggggatgatattactctcaatatcttaaacaccctgtaggtaagccctctgtgatattcctcataatatccagagggagaggatgatattactcccaatattgcatgaagtctacaccccacctgtgatattgttcctaatatccaggatgggagaggatgatattactcccaatgtcgcaggggatgtacaccttccctgtaatattgttcgtaatatctagaaaaggagaggataatattactttcaacatcgcagggggtgtacaccttccttgttatattgttgctaatatccagggaaaaagaagatgacattaccaccactattgcagaaggtgtacacccccccttgatatagttcctaatatccagaaaaggagaggagatattactccaaatattgcaagaggtgtacattcccctgtaatatttttcctaacattcaggaagaaagagagtgatattgcccttaatattgaagggagtgtgccccccccgtgatattgtttctaatatccaagaaatgaaaggatgatattactcccaatatcacaggggctgtacagccccctcccatgatattgttcccaacatcggggggggggtgaaatagtattattcccagtatcacaataggtgtacacacctgtcgtgatattgttcctaatacccatgggggaaaggacgatattattcttaatatctcagagggatgtacaccctccctgtgatattgttcctaatatccggggtgggagaggatgatattacccccaaaatctcaaagggtgtacacccctcttgtgatattgttcctaatatccagggtggagaggataatattattcccaatatccaggaaaggaaacgatgatgttactgtgaatattccagggggtgtcctcccctctgtgatattgttcctaatatccaggttggggagattatgatatttctccaaatatcacaaggggtgtacaccaaccctgtgttattgttcctaatatcgatggggggagaggacgatattactcccaatatcacagggggtgtacaccacctttatgatattgttcctaatatccatgaagaaagaggatgatattactttcaatatcgcaggggatgtacactccccctgtgatattgttagtaatacctaggagaagaaagtgtgatattactcccaatatcgcaggggatgtacacgcttcctgtgatattgttcctaatatttagggggaaaggggatgatattactcccaatatcgaatggtgtgtacacccccccgtgattctttttttttttttttttttttttttgagatggagtcttgctctgccgcccagactggcgtgcaatggcgcaatctcggctcactgcaacatttgcctcccaggttcgcacgattctcctgcctcagccttcggagtagctgggattataggcagctgtcaccataccaggctaatttttgtatttttagtagagttggggtttcaccatgttggtcaggctggtcttgaattcctgacctcaaataatccacccaccttggcctcccaaagtcctgggattacaggcataactttccctgtgatattcttcctaatattcaggaagaaagaggatgatattgctcccaatatcgcagagagtgtgcactcctcctgtgatatggttcttaatattcagaggaggagaggatgatattactttctatattgcagaaggtgtacacctccctcgtgatgtctttcctaatatccagtgggggagaggttattagtctcaaaatcacagaaggtgtaaacccccatttgatattgttcctaatattcaggggtggggagagaaaggtattactcctagtatttcagggcatgaacacccccaccgtgatatcattcctaatatccagaaggggaggcaatgatatttctcctaatatcacaaagggtgtacaccccttctgtgatattgtaaatattctgtgtgtacacccccctgtgttatagtctgtaatatccgggtgggggagagggtgatatttctccccatattgtaggggatgtacacccttctgtgatatggttcgttatatccagggaagaaaaaggtaatattgctgcccatattgtggagagtgtacacccccatgtaatatggttcgtaatatccaggagtggagagggtgatactgctccttacatcgaggaaggtgtacaccttattgttatatgattcgcaatatccaggggaggagagagtgatattgctccccatgtcgcagggggtgtaaaccctccgtgatatgattggtaatatccaggaaaggaaagggtgatatttctccccatatcgcgggggacgtacatcctcctgtgatatggttcgtaatatccaggaggaaagaggaaaatattgctcttcataacccgaggggtgtacaacccctgtgatatggttcgtaatacccagaagtgtacacccctctgtgatatggtttgtaatatccagggggttagagggtgatattgctccccatatcgcagtgggggtacacccccctggattggttcataatattcatggggggagaaatttacatttatcctcatatcagggggggtgtacaccccccgtgatatggttcgtaatatccaggggaagaaagggtgatattgctccttatatcgcggaaggatcaccctcccctgtgatatggttcataatacccagacgggaagagggtgatattgttcttcataaagcgaagggtgtacagccccctgtgatatggttcataatatgcaaaaggggagagggtgatattgctccccatatcacggagggtgtactcccttctttgatatggttcgtaatatccaggggtgtagatggtgatatagctcgccctattggggagggtgttcacccctctgtgatattgttcgtaatgtccagggaaagagaggatgatattactcccaatatcgcagaaggtttacaccactctgtgatattgttcataatatccagggaaggagaagacgatattactcccaatatggcagggggtgtagaactcctgtgatattgtttgtaatatccaggcaaggagaggatattactctcaatatcgcagaaggtttacacccctatgtgatactgttcatgatatccagggaaaaagaggatattactccctatatcacaaagggtgtacacccctttgtgatattttttgtaatatccaggggagagaggataatattactctcaatatcagaaggggtgaaaaccctcctgtgtcattgttcataatatttagggaaggagagagtgatattactccaaatatcacagtgggtgtacacccccctatgatattgttcctaatttccagaaggggagatatgatattattgccaatatcgcagaaggtgtacaccttactctgacattgtttgtaatatccagatggggaaatgatgatattactcctaatatcacagggggtgtacacccccttgttttattgtttgtaatattcaggggaagagacgattatattactcccaatatcgcagggtgtgtacaacactctatgatattgttcataatatccaggggaggagaggaagtgtacacccccccgtgatattgttcgtaatatccagaggtagagaggatgatattactcccaatattgcaggtggtgtacacctttctgtgatattgtcatgatattaagaaggggagaggatgatattactaacaatatcacaaaaactgtacactccctgtgatattgttcataatatccagaagaagggaggatgatattattctgaatctcgcagaagatatacaccaccctgtgatatggttcataatatcctaggggaaagaggatgacataactgtcaatatcgcagggggtgtacaattccctgtgatattgttcacaatattcagagggaaaaaggataatattactttcaatatcgcaggcggtgtacacattactgtgttattgtttataatatccggaatgagagaaaattttctcccaatatcacaggaggtgtacactcccctgtgatattgttcgtaatatccagggaggggagaggatactattactcccaacatctcagggagtgtaggccccccctttgatattgttcctaatattcggaagtggagaagatgatattacttccaaaatcgcagggggtgtacactccctctgtaatattgtttctaatattcatgagtggaaagaaagatattactcccagtattgcaggggacatacaccacactgtgatcttgttcacaatattcgggggggagaggatgatattactcccaatatcaaagtaggtgtacacccccttctgatattgatcgtaatatccagaattaaagatgataacgttactcccaatattgcagggggtgtacatttttgaatactgttcataatattaagagggggaggggatgatatctgtcccaatatcgcaaagtgtgtacacctcctgtgacattgtcccaaatatccagaggaaaaaaggatgttattactcttaatatctcagagagtgtacacctccctgtgatattgtttgtaacatccagaagaaagaggctgatattactcttaatatcgcagggggtgtacacccccgccccgggatattattcgtaatatccagggggaagtggaatgttcagaatgggagaggatgatattacttgcaatatcatagtgggtgtacaccccactgtgatattgtttgtaatatccgggaaaggagaaaatgacattcctccccatatggcaggggctgtacaccacctatcatattgttcaaaatatccagaaggggagaggatatgtctccaagtatcacagggggtgtacaccccgctgtaatattcttcctaatatccagggtgtgagaggataatagtactcccaatatcccagggcatgtacaccccccttgtgatgttgttcctaaaattcatggggagaaagaatattactcccaatatcacagggggtgtacatacactctgtaatattgttgccaatatgcagcaggagagaggatgatattactcccaatatcacaggggctgtacaccccgctgggatattgtttctaatatcaagggggaaaaaggatgatattactcccaatgtcgcagggtgtgtacttcctctttgtgacattgttcctaatatccaggagagaagagggtgacattccttccaaaactgaaaggggtgtacacaccctttgagatattgtctttaatatccagaacgaaacaggatgatataactcctaatactgcaggggggtacaccctctctgtgatactgtttctaatatccaggaggggaaagaaaaatattaatcccaatatcacagggggtgtacattccccctttaatattgttcctaatatccaggaagacacaggatgatactatttccagcagcacagggcatgtacacccctttgtgatattgttcctaatatccaggaaaagagaggatgatattactgtcaatattgcagggcgtatacactggttctgtgatattgtttctaatatccgggggtggagaaaatgatattactcccaatattccagcgggtgtacacccgttctatgatattgttcctaatatctgggggagagagaatgatattattgtcaatatcacaggggatgtacagattccctgtgatattgtttctaatattcacagggggagaagggtataatactcccgatatcgcagggggtgtacactccccctgtgaagttgttcctaatatccagggattgagagaatgatattactcccaatatcacaggcggtgtaaaccccctgtgtgatattgttcctaacatccagaggaaaagatgatgatattattttcaatatcacagggggtgtacgcatccctgtgatattgtttctaatatccaggggaggagaggatgatattattgttaatatcgcagggggtgtaccccaccctgtgatactgttcctaatatccggggtggaagaggataatattgctcccaatatcgcaaagggtgtacaaccttcctgagatattggtcctaatatccagggagggagaggatgatattactttcaatatcacagggagtttacacaacccctgcgatattgttcctaatatccagcggaagaagagttaggataatactattttcaaaattgctgggtctgtaccccctccccgtgatattgtttctaatatccaggaggggagaaagtaatatgactcccaatatcttagaagatgtacaccctccccataatattatttcttacatccagggggtagaggatgattttgctttcaatatcacagagggagtaaacctttccggtgatattgtttttaatatttaaaaagagagaagataaaattactcccaatacaaaggggatgtattgtgtactcccccctctgatattcttttttaatatccagatggagagaggatgatattactttcaatattgcatgggatgtataaatcccctgtgttattgttctgaatatacaggtggggagagtatgatattactccaaatatcgcagggggttctttccccctgtgatattgttcctaacattcagggagggagaggatgatattactcttaatattgcagggggtgtacccacgcctatgatattgttcctaatatccagagggggagaggatgatctaactcagaatatgacaaggggtgtacacacagcctgtgatatggttcctaatatacaggggagaaggggataatatttctcccaatatcgcagggggtgtacaaccccctgtgatactgttcctaatatacagaaggggacagcatgatattgttcctaatatcgcaggaggtgtacaacgccctgtgatattgttcctaatatccagggcgggagaggatgatattaccctcaatatcgcagggggtgtgcactttccctgttatattgttcctatgatccgggtggggggaaatgacattagtcccaatatcgcaggatgtgtgcaccgctcccccgtgatattgttcctaatatcaagggggagagaggaggatattactcccaatatcgcaagggatgtacatcctccatgcgatattgttcgtaatattcaggaggagagaggatgatattactcttaatatcgcagaaagtggacacccaccctgtgatgttcttcataatatccagggaagcagacgattatatgactttcaatatcgctgggagtgtacatcccttttgggatattgtttctaatatccaggaagggagaggattatattactctcagtattgcaggcagtgtacaccttttttgtgatattgttcctaatattcagaaagggaaaggatgatattactcccaatattgcaggtggtgtatatccccctctgatattgttccttatatcaaggaagagaaagaataatattactcccaatatcaaagacagtgtagacccctcctgtgatattgtatttaatatccatggggaaagaggatgatgttactcccaatatcgcagggggtttacacccacactgtgatattattcctaaaatccagtggaggagaaaataatattgctcccaatattgcagggtgtatacaggccctcccccgttatattgctcctaatatccagcggtggagaggatattactttcaatttgtgtagggagtgtatacccccctgtgatatttttctaatatcaaggatgggaaaggatgacattactcccaatatcgcaggaggtgtacacgccctgtgatattgttcctaatatctagggaaggagaggatgatattactttcaatattgcaggagctgtacaccctctgtggtattgttcttaatatttaggttgggagaaaatgatatgagtccaaatatcgcagaaggcatacacacttccaataacattgttcttaatatccgggggagagggtgatattactcccaaaatctctggggggtgtacacccccttctgatatttttcctaatatccagggaaggaaacgatgatattactataaatattccaaggagtgtacaccttcctaatatcctaatattgttcctaatatccaggggtgggagaggattatattactcccgatatcgcagtgggtgtacacccctcctgtgatattgtttctaatatccaagctaggagaaaatgatatcactctcaataccacagggggtgtacaccttccgcatcatattgttcctaatattcagagggaaagaagatgaagttactttcaatatcggaggggttgtacacaacccctgtgatattgctgctagtatccaggaagaaaggggattatgttactccccttatagcagggggtatacacctcccctgtaatattgttcctaatatcaaggctgggatatacgtggggggaaggatgatattactcccaatatcgcaggggttatacaaccttctgtgatattgctcctagtaaccagggcagaagaagatgatattactcctaatatcgcaggaggtgtacactcccccattatgttgttcccaatatgcagaaaaggagaggatgacattattgccagtatcgcagggtgtgtacaccacccctgtaatattgttccaaatatttagggggagagaggatgatattactcccaacatcgcagggggtgtacacacatcccctgtaatatagttcttaaaatctaggggaaaaggggatcttatttctctaaatattgcagagggtgtacactccccggtgatattgttcctaatagccgggagggagataattaaattactttcaatatctcagagagtgtacatcgcccttgcgatattgttcctaatatccagagcaaaagagaatgatattactcccaatatcttaggagtgtacatttaacctgtaatattgttcctaatatccagggggaagagaatagtattactgccaatatcgtaggggttgtacaccttttctgtgatattgttgcaaatatttagtagagggaaagaatattactcgcaatatcacagggaatgtatacttcccctgtgatattgttctgatatccagaaaaagagagggtaatattactcccaatattgcagggggtgtacaccccccttgtgatattgatcctaatataaaggaaggaagaggatattactcctcatatagaaggggttgtccaccccccttgtgatattattcctaatattcagggaagcagaggatgatattattttcaatatcacagagggtgtgcagtccacctgtgatattgttcttaatattcggggggagaggatgttattatgcctgatatcgcagtagaggtacacccctcaagtgatactgttcctaataaccaggggtgaagaggatgatattactcccaatatcgcaggtggtgtacacccccccatgatggtttctaatatacagagggggagaggaaaatattactcccaaaatcgctggaggtctacaccccccttgtgatattgttcctaatatccaggaaaggaaacgatgatattactgtgaatattccagggggtgtacacccgctttgtaatattgttcctcatatccagggtgtggagaggattatattactcccagtatcgcagggggtgcacgacgcccctgtgatattgtttttcatatccaggaggggagattattatcaatatggcaaggggtgaacaccccctgtgatattgtacttaatagttaggttggcagaaaatgatattagtctcgatatcgcagggggtgtgcactccgcctggtgatattgcttttaatatcaagggggagaaaatggcattactcccaatatcgcagggggtgtacaccgctcatgtgatattgttcctaatatccaggtggagagaacataatattactcccaatatcgcacaaggtgtacacccctcctgtgatatggttcctaatatccatgggaggagatgatgatattactcccaatatcacaggggatgtacaccacccttgtgatattgttcctaatatccagggaagaaaacgatgatattattgtgaatattacagggagtgtacacactccctgtgatattgtttttgatatacagggtgggagaggatgatattactcccaatatcacataaggtgtacaccccccgtgatattgttctaaatatttcggtggggagaaaatgatattagtctccatatcacagggggtgtgtgctcctcaggtgatattgtttttaatatcaagagggggaggagattatattactttcattatcacagggggtgtacacccctcctgtgatattgttccttatatccaggcgaggggaaaataatattactctcaatatcgcaggaggtgtacacaccccatgtgatattgttcctaatattaagggggaaagaagataatattactttcaatatcacagggtttgtactcctttcttgtgatatagtttttagtatccagggggaaagagcatgatattactcccattgtagcaaggggtgtacacacctcctgtgatattgttcctaatatccagaagtggtgaggatgatattactcccaatatcgcagggggtatacaccccacctatgatattatttctaatatccatgggaaaagagtatgatattacacccaatgtcgcagagggtgtgtatttttcctgtgatattgtttctaatattcaggcggggagaagatgatattactctcaatatagcagaaattgtacatccccgctgtgatattcttcataataatcagggaaaaagaggatgatattactaccaatattgcaggggggttacacttcccctatggtagtgttcctaatatccaggaagaaagaggatgatattaatcccattatccaggaagtgtacacccaccctgtcatgttgttcctaatatccagcagggaagaggatgatattacaccccccccccgtgatattctccttaatatccaggaggggagaggctgatattactggatatatagcaggggtgttcataccttctgtgatattgttcctaatatccagaaaaggagaggatgatattacttccaatatcgcagaaggtgtacacctccctgtgatattgatcctgacattcagaaggggagaggatgatattactcaaaataccgcagggcatgtgcattcccttgtgatattgttcctaatacccagaagggaacaggataatattactttcaatatcgcagggagtgcacacccccctttggtatggttcttaatatccagaaggaaagagggtgctattactttccatattgcaaggggtgtacaccccactgtggtatggttcataatatccaggcagggagagggtgctattactccccacagtgcggggcatgtacaccctgctgcggtacggttcctaatatccagggggagagaggatgctatgactccctatatcgcggggtgtgtacacccctgtgtggtatgttttgtattctccaggaacggagagggtgttgttacccctcatatcgctggaaatgtacactcccctgtggtatggttcgtaatatccaggggattgagggtactgttacccccatactccccatatcgtggggggagtgcacctccctgtggtatggttcgaaatatccagggtaagagagggtgctattattccccattttgcaggaggcgtacacccccctatggtatggttcgtaatatccggggtgaggggatgctatcaaaagaagagagaaagagaccccccatattgttctatattattttatactcagtacctgttttaagaagaaacaaggaagtgaaaccaaaagcaggcagcccggcgccaggcaccagacccaaaaccagacccgaaaccaggcctgggcctgcctgaccttagcctgatagttaaaattcaacccatgacctagcaaccaatgttatccatagattccagacattgtatggaaggacattgtgaaatttcttgttctgtgctgtttcactctgattaccggtgcctgcagcccctgtcacatacccactagattgctcaatcaatcatggccctttcatgtaagatctttagtgttgtgagcccttaaaaaggacagaaattgtgcactcaacaagctcggattttgagacgctagtctttcgatgcttccagctgattaaaagccacttccttcactacctcggtgtctgtggggttttgtccgcgactcctcctgctacactatgactccccatatcaaggggggtgtacacccccctgtggttcgtaatatccagcaggggaaaaggtgctattactccccatattgcagggagtgtacacccccttgtagtatggatcgtaaaatcaaggggggagggaaggtgtaattatccccatatctcagggggtgtacacccctttgtggtaaagtttgtaatatccagggatattacagggatattatccccaaattaatacttttataatttcttatgcctgcctttactgcaatctctgaacataaattgtgaagatttcatggacatttatcacttccccaatcaatacttttataatttcctatgcctgtctttactttaatctcttaatctcatcatctttgtgagctgaggatgtatgtcgcctcaggaccctgtgatgattgcattaactccacaaattgtttataaaacatgtgtatttgaacaatatgaaatctgggcaccctgaaaaagaacaggataagagcgatgttcagcgaacaagggagataagcataaggtctgactgcctgtggggctgggcagaacagagtcacatttttcttattgcagaaaatgagtaggagaaatatcactgggaagggaacgcattcctaggggaggcctatggacggccgctctgggggtgtatcccttatgtggttgaagataagggatgaaatacaccctggtcccctgcagtgccctcaggcttgctaggattagaaattccagcctggcgaattctagtcagaccagttctctgctcttgaaccccgtttcctgttaagatgtttatcaatgacaatgcgtgcacagcaggacatggaacctcaatagtaattccattttctccctggccttgtgaccttgctaggcccttctgcccttgtgatcttttattgccatttgaagcatgtgatctctgtgacccactccctattcgtatccccctccccttttgaagtccctaataaaaacttgctggttttgcagatcaggtggtcatcacagaacctgccgatatgtgatgtcaccccggaggctcagctgtaaaatttctctttcgtactctttcactttatttctcagaccaggtgacacttaaggaaaatagaaaagaacctactttgaaatattgggggctagttcccccaatagacattgttcctaatatccagaaaaaaagaagatgatattactcccaatatcacaggggttgtgaaccccacctgtgatatggttcctaatatccaggaagggagagaatgatattactctccatattgcagggggtgtgcacatccctgtgatattgttcctaatatccaggggaggagagggtgatattactcccaatattgcaagggttgtaaactccaccctgtaatattgctcctaatatttaggatttagggggggagaggataatattactcccaatatcgcaggggatgtatatgccctctttgatattgttcctaatatccagggggggagaggataatattactttccatatcacaaagagtgttcacccccctgtgatattgttcctaatatccaaaaaggaagaggatgatatcaatcccaatatcacaggaagtgtacaccccccccttttatattgtttctaatatccaggggaaatgagggtgatatttctctcaatatagcagaatgggtacactccccctgggatattattcctaatatccaggggaaaaaaagaggttgatattcttcccagtatagcagggaatgaatacaccctttgtgatattgcttctaatatcaaggggaaaagaggatgatatgactcccaatatcacaggggatgtaaacctgtggcgttgttgctaatatcaaggagggaagagtatgatattactcctaatgtcgccgaaggtgcacactttccctgtgatattgttcctaatatccaaaagggaagagaatgatattacccccagtattgcagggtgtacaccacccctgtgatattgctcctaatacccaggaaaaaagagaatgctattacccccaatatctaaggggacgtataccttccctgtgatattgtttctaatatccaagtggggagaggatggttttactctcaatattgcagggagtgtacactccccctgtgatactgtttctaatactcgggctgggagaaatagtattactcccaatatcgcagtgatattgtttccctgtgatattgtttctaatatctagtgggggagataattatattactaccccatacacaggggagggtgtacattcccctgtgatattgtttgtaatatccagggaaggagaggatgttactcccaatatcacaggggttgtacaccccttttttgatattgttcctaatatctggggggcagagaattatattactgtcaatatcacagagtgtgtacaccccctctgttatattactctttatattcagggcggtagaggatgatattactccctatatcacagggggtgttcacccctcctgtgatattgtttataatatctaaggggaaagaggatgatatcactctcaatatcaaaggaaatgtacacctttcctgtgatattgtttttattatataggggggcagaggatgatattaagaacaataccacaggggatgtacacccacgtattgatattgtccctaatatgtatggggaaagaggacagtgtaactcccgatatcgcagagtgtgtacacccccttgtgatattgtttctgatatacacggggagaaaagataatatttcttccaaaattgcagggggtgtacaaccccctgtgatattgtttttaatatccagtgggggagagaatattactcccaatattgcagggcgtgtacacaacccctgtgatattgttcctaatatccagagtaggggaggatgacattactttcaatatcgcaaggggtgtacattcccctgtgatattgctcctaatatccatgaggggagaggatgatattattcctaatatggcaggggctgtacaccttccctgtgatattgtttctaacatccagtgggggagaaaatgatattactccctatatcacagaaggtgtacactttccctgtgatattgttcctaatatccagaaggggagaggataatattactcccaatatcgcaggaagcttacaactcccctgtgatattgtttctaatatccagggaggtagggatgatattactcccaatatcgcaggggatgtacactcccccgtgacattgtttctaataaccagggggtgagaggatgatattacgcttaataccgaagggggtgtacacacccttgtgatattgtgcctaatagccagggggaagaaaattatattaattttaatatttatggggaaaaaggatgatattactcccaatatcacaggggctgtacaccgaccttttgatattgtttttaatatccagaagagaagaggataatattgctcccaatatcagaaaaggtgtaaaccccttctgtgatattggtcctaatatccagggagggagagaataatattactaccaatatcacagaaggtgcccacccccaaggtgatattgctcctaatatccaaagataatagggtgatgttactcccaatatcacaggaggtgttcacaccccttgtgatattgtttctaacgtacagggaagggagaggatgatattattcccaatatcacaggaggtgtatactcctctgtgatattgattttaatattcggggggaaaggatgatattactccctatatcgcagagggtgtacaccctctgtaatattgatcctaatatccagggcgggataggatgatattactcccaatatcgcagaaagtctacacaacccccagtaatattgtttttactatccagggggaagaggatgacattactcccaatttcacagagtgtgtacactcaccatttgatattgtttctaatatctagggggagagaatatattactcccaatatcacaggaattgtacaccacctctgtgacattcttgtgaatatccggggaaaaagagaataatattactcccaatattgcagagcgtgtacacccctccatgatatcgatactaatatttttttaaagaggatgatattactcccattgtcacaggatgtgtacaccccccttgtgaaattgttcataatattctggggggagagcataatattactccccatatcgaaaaaggtgtccaccctccttataatatggttcctaatatccaggatattacttaatccaggatacttgtaataccctaaatatacaattgcttgaacctccacctcccaggttcaagcaattcttctgcctcagcctcccgagtagctgggactacaggggcacaccaccacacccagctaatttttttttcttgtatttttagtagagatggggttttgccatattggccaggctggtctcaaactcctgaccttgtgatctgcccacctcagcctcccaaagtgctgggattataggcgtgacccaccgtgccaagccaggaagaggatgctctatagatttccccaataagagatggctttgcagggccattccaaaatatgtcaaagaaatacatttggggataaaatactttgatttcctttagggaatgttatctattatgtgatgctataccagagtcaggttggagtcggttatcttattgcaacaaagagtctgttccgtcactgttgggatctctattttttcctcttatttcttgagacagggtctcactctgtcacccagtctggagtgcagtggtgcgatcttcattcactgaaacctctgcctcctgtgttcaggtgattctcgtgcctcagccccttaagtaactaggattacaggtgtgcgccaccacacccagctaatttttgtattttcagtagagatggtattttgccctgttggccaggctggtcttgaactcctggcctcgtgtcatctgcccacctcgacctcccaaagtgctgggactgcaaatgtgagctattgtgcccagccaggatctctgttttaatgttagtgctggtcactttgcatgaactccaaagggaagaaatataatgaggtgtgtctgaccccctgccttctcatcgtgacctgaattagtttttcaggtttgcaggggatacccttggacaagaaggggctctattcggttggttggggggattagaattttactttttgtttacaatatttctcctgaaagagttaggggctcacaaggaatttccgcgtgagcaacttatgaggaaagccatctgggaagatatgtgtccttgtgtcactgggatattctcgtttaccccaatgatacggcaatgacgcagggttgtgaaattacagctatgtgtttggggaaaaaagaaagcaggattgtgtgactacgtttccaaacttcacttgcccttagccatagtgagttgggggcctggagattctgttttctttcacaatgatatagatacaattaaatgtatagaaagcaaaaaaataaaaaggtgagtaatgaggaacctctgattcctgagtggccatgtagttacccatggcacagagccacagttactgaaggtaaagtttgctggggaatttagaaatgaatccagctcttggaggagtcagtttactggatgcctaagaaaatgcaaacaaaataagaaaaaagggtaatattcaatcccatagttattgttacctgtcatagctaaagtaaaattaaaacagagtgctggcttcaatcttgatgctacactaagcttagatttcagtgaatgtgagtctcagccactagctcagagccacctcccaaagaccaaatcatgtagggacaatagaaagtacttctgagaattgtggttaccaagaacctagtaactgttggggaggagcaaaacaaagtacagaaaccagagggtacaatctgagtgagactgctatcagcttctggaggagcctttactaaaatgaatgatgagagtaactggatgatgagagtaactaatggatgatgagagtaagcaatgtctttggttttcttttttttttttttttttttttagcagacgtctcactcttgtcgcccaggctggagtgtaatggcatgatctcgcctcactgcaacctccacctcctgggttcaagcaattctcctgtctcagcctcccgagtagctgggactacaggcactcatcaccacacctggctaatttttgtatttttagtattttctggtgagggtccaggtttccggaaacaactcagagacatatgttaagatgttatctttagttttcacagggaaccaaatatgttacgactccaatttccttggctattgttttaagttaccattaccttctcgttgatcaagttgctcatttacttctcaagcctagctagatgcctggaatttcccttgaaggaagtcaagattttcctttatctccatactggctgatggtgatcgagtaagcccctaagaggggtccctgctccatctcgagatgctgctagattctacagtgcctaataaacagctctcgcctggccgacaaagagctgcttgctctctggatagcaattccaaagtgaacagacaacatcctgtttggaagactgccactctgttagaagaagcatcaggaaaacctttcttttgagctatttataactaacagcaattgaccaagtatacttttgtgagtgaaactgacctttctccctgtaagaattctccaaaatttggaaactatttgtgagtatttttacttatggcaatataattattggcacaagctcaatcagattcggttttctttcgtaacaggaaccattggagatactcattactctttgaaggcttacagtggaatgaattcaaatacgacttatttgaggaattgaagttgactttatggagctgataagaatcttcttggagaaaaaaagactgggtatattttcaatatgctttccttttaaggtccctcacctgtggaaagtaaagaatgtcactttctgacaggctcaggaacctcaagttatgtagggatctcaagaagatgggggaattcacccagttcatacaggtgaaattgctgttgcaaagattatgaatatgagagaagtccagcatggctgacttcatctcgtgtctggcctcaggctggctgcccttgctcactcttgggcataggccaagctagccatgggaggaatttagtttatagtttaactttgaagcacggatgataatagtctctccctaaaatgaaccccttccttgctcagggactgaaactacctttgtatgacaaatgaaagcccacaagattaagattatgagaggggcctgaattctgctaaaatgcaggtgtagctgactgataacaagtcattgtcccacagcttgcctttctataatctcttgcttctcaggagtcacatggccagaggtcctgagatttccagtcctgtgacccccacccagagatggacttagtgcatgaggaccattttccacacccctatgatttcatcctcaaacaatcagcagcaaccattccctagccccctgccttccaaattatccataaaaatcctagcctctgagttattagggagattgattaataatcccagtcctaccccttgggttgctctgatttaattaaaccttctctactgcaataccacggactcagtaaattggttttgtctgtgcaatgggcaagaagaacatgttgcatggttatacaggtactacaagcacagtctgatggcaaattattggttttgcttcctgcccttgatgtttctaaacatctagtccaaaattacttgtgaaaggtccagcaaagccaattttaaaagaggctatatggccaatcactattctttctacacattattgcaaataatcaggccacggctgggcacggtggctcatgcctgcaatcccagcactttgggaggctgaggcaggatcacctgaaatcaggagttcaagaccagcctaggcaacatgataaaaccctgtctctactaaaaatacaaaattagccaggcatggtggcatgcacctgtaatcccagctacttgggagactgagggaggagaatcacttgaacctgggaggcagagattgcagtgagctgagatcacaccactgcactccagcctgggcaatagagtgagactttgtctcaaataataataataataatcagaccaagtataatgaaattaaaatttattttgcaaataaattggtcctactacaatttatccttcatagaaatgtggaaactgaagataaaaaaaattaggtttcagaagaaaactatactacacctgttattagattctagccctaaacattgtttttgaggtttttattatttacctgcaatttggtctaaattctgaattatttcctgactacaagtatccaaggaataaatgggttttctttttctttatgatagttttagttggcttctaatgcaacaacaatttttattgtaatcctgtgtgcattctattcctactattcaaattattaatgttatagatctttcattgtagtacttctgaattaaccaaaatcacagtattctgaagatgattctacaaagcctgctgtttctacaaaggctgctgatgatttctacaaagcctgctgtagtgttgctgtggcctctgcttaaaaaagtagaaaacacattgatgcagcatgttcaccccaacctccctgcctaaaggctcagggaccatcttggaagaggaaggcgcgtgagattgtaagagccgaattagggggatggagtgtggagaataaggacacttcatcttggatgctcacctgccaaattgacttctgatgaaagccagctccagaaatgtgcctacagttactactttcacctaaaccctgcccttagtcaaatccttctcttcttctaagcaatcaacttcaattccttgtataacccacagtataaaagggcttttataccattctatcctattgcatgtaagccttgggtctgggaggtaacagtgtgggattccaccatctcatctccctgccacccaaacatgcctgctcttctttaagcaatattaaatgtttgtacttcagaaatttgatttgtcagcctcttcttcagactctcagcttctttggcctttgggagtaaatttgcataggcctgctcaaaacaggatgttctgggggtttgggggtgttgttttgttttgttttttgttttgtttagagacagggtctcactctgtcacccaggttggagtgcagtggtgcaatcatggcacactgcagcctcaaactcctaggctcaagcaatccccccaccttggcctcccaaagttctgggattacaagcataagccaccatgcccagccctggacttttctttaaagacatttacacagtgtaggaattactgtgggtgcactgctcaggtccccttctccaggatgctcattcctacctcatagatgattttcctgcagagatttgacctcagctgaagggcagtcacctggtccaggtggttgctattcacctccttcctgagaacagccaacagccagggacacgctagcacagagatataagagcgaccaaggtgaggccccttctgtgctgcggtgcatgctccagagcctccctgggatcagacttaagagggtctccagccagatctggtcttcgctgctttcctcgagctccccagcgcactcctgcaatgcatcttttttttttttttttttttttttgagacggagtttcactcttgttgcccaggctggaatgcaatggcgcaatctcagctcaccacaacctctgcctcgcgggttcaagtgattctccttcctcagcctcccaagtacctgggattacaggcatgcaccaccacgcccagctaattttgtatttttagtagaaacgggtttctccatgttggtcaggctggtttcgaactcctgacctcagttgatcctcctgcctcagccttccaaagtgctgggattacaggtgtgagccactgtgcctggcccaatgcacctcttgaatcacctcctcatgctttgcttttagagaacatgatccccaacatgtgattccagcaaagattctagaaagccaaccgtgacaatcacttctgggtttagatgacccccccccaccacaagatggcagtgagcacctcatcacagaggtgctgatggtctgcagcaccgcgccaggccagaacgtgccttttacagaagaaaataacccagtagctgactaggatggtgaggagggctggtgagcactgcggtagtgagagggacactagcatcactgagatgcaagtgatggtcatttttcataggtcaaagctcaaagcaggggacagttacagggcagggcttcatagcaccagtgtgatgaaagtatctgggagtggctaaggccagcactatgccatgggaagcaaggtgggcctgaggaggaggcagcagcgtcagcctgcaacaagtgggggctgccctgcagagacctaagagtcatgttatagagcacagtgtctgtaaggccaagaagtgtggacagccaagtgtgtcaattactagacatactcaagaggagcaggaagggcagggcatggtggctcatgcctgtaatcccagctacttgggagactgaggaaggagaatcgcttgaacccgggaggtgaaaattgcaatgagccgagatttcgccactgcactccagcctgtgtgatgggagcgggactccatctcaaaacaaaaaaagaaaaaggaaaaagaaaaaaagaaaaacctaggtatacttctcaagcaaataaaaataatcaaaaccaatatcatgcccgggcacaaatttcatatatataacagatttaaatatatgagggtgattatcctctcatatctccatttttttttgtttttccatttttttctttactaaaaaaagttaatgccaatgacacacaatttttttttttttttttttttttgagatggagtctcacttcttcgccctggctggagtgcaatggcgtgatctcgactcactgcaaagtctgcctcctgggttcaagcaattctcctgcctcagcctcccaagtagctgggaccacaggagtgagccaccacacccagctaatttttgtatttttaatagagacggggtttcaccatattggccaggctggtctcaaactcctgatctcaaataatctgcccgcctcggcctcccaagattctgggattataggcgttgagccactgcgccccgcctatgtatgattttttttttaattttattttcataagtttttggggaacaggtggtattttgttacatgagtaatttctttagttgtgatttgtgagattttggttcacccatcaactgagaagtatacactgaacccaatttgtggtcttttatccctcacccccttcccaccctttcccccggagtccctgaagtccattgtatcattcttatgcctttgcatcttcatagcttagctcttgaacccttactttctgtttgagggagaagacatatcatctacaagtagatactgtgtaaacattccattgcatgactatcccataacttatttattatttgtgtttggttatttgctgctatgtaacaaccccactcccaactaaatggtgtgacaattccatgattctgtggatcaaaaattctgaaaagtcaaacccaaggagttttgtctctgctccatgatgctaaagcctccgcaggggtgaggcgaatggctcagggtgactgaaaagctcagggttggaacagctggggatgaggcctctatgtataagatgattcttcactcacaggtctgaaactatggtggggacagccagaaggctcggctcagctgggacagtcacctgagccctacacatgacctctccaacatggtgatcctgaagcagttgggtttcttacacagcatcacacttttcttttttttttttttttttgagatgaaatattgctctatcacccaggctggagtgcagtggcacgatctcagctcactgcagcctccgcctaccaggttcaagcgattctcctgctccagcctcccaagttgctgggattgcaggcgcctgccaccaagcccagctaatttttgtatttttagtagagacggggtttcaccttgttggccaggctagtcttgacctcttgacctcaggcgatccgcctgcctcggcctcccaaagtgctgggattacaggcatgagccaccgcgcccggccaaagctcacacttcttatgattcagccttagatgtcacatcagttcattttccccacacttattagtgttagaagtcacaagcccacccatactcaggggactggcacacagaccccactctcaatggaaggggtgggacaccaccattcctgctgatgggcatttgggtaacttcctgtttgaagctattaagattgggctgctgtggccgggcgcagtggctcacgcctctaatcccagcactttgggaggccgaggcgggcggatcacgaagtcaggagatcgagaccatcctggctaacacggtgaaaccccgtctttactaaaaataccaaaaaaaaaaaaaattagctgggcatggtagcgggcgcctgtagtcccagctactcgggaggctgaggcaggagaacggcgtgaacccgggaggcggagcttgcagtgagccgagattgtgccactgcactccagcctaggcgacagagcaagactccgtctccaaaaaaaaaaaaaaagattgggctgctgtgactattctagtaggtgtctttggtgagcgcctacacgtgtttctctttttctctttagtatatgcccaggaggggaactgctggctcccagataccgtatgttcagggtcacacacacttccacagggttttccaaagcccttgtaccagcacgcactcccagcacctgtgtgactgctccagctgtcccacagtctcatcagttctattgctgatattttcattttagcttaagttatatttaataggaaaattaccgttgcctctgccccccgttcctgcctgtaggagtttctcgtagctgttgctacaggtggccacaaatctgtcacttaaacccacacaaattgatgtccttatggctttggagtcagaagtgtcaactgaaggtactagcagggctgtactgacctggtggcctcagggagcatctgtgctgcttctccaccttctagaggctgctgcatccctcgctccagccccttcctgacaccactcaccctcctacttctgttatcacatcctcaccttctctgtgttcagggctccctctgtctctctcttgcaagcacacttgggattccattgagggccacccacataacccaggagaatttctccacctcaatatccttaacaactgcagagcccttttgccataaaagttaccattcacgggttccagggattgtgacatgggtagctttaggagtgattattcctgcctgtctcccgctcaccagaacttggactttctctctcaacaggagccccctgtgtgggaatagcctgtctcaacgacgccctctataaggacctgcttcctcaaaggacctcatagtcgggtcctgcccctcagtgtccagtctgccttggctggaggggctgcaggggtgtgttggcgccacctggtggagacagggcatcacagcaggtgggagcccagtagaagcacaaccaaaacatgggtaatgtttaaaattttctggctaagcgctgtggctcacgcctgtaattccagcactttgggaggccgaggtgggtggatcacatgaggacgggagtttgagaccagcctggccaacatggtgaaacatcccctctactaaaaaatacagaaaaattagctggacatgtggcgcgctcctgtaatcccagctactcgagaggctgagacacgagaatcgcttcaaccccggaggggttgccgagatcgcgccactgcactccaggctgggcgatagagcgagactctgtctcaaaaaaaaaaaaagaagaggggaggcgaggggaggggaggggaaaagggggaatttgtttggagctgagacatccatcttctcctgacctcagatatttgcactcctggttatgaagccttcacacttggactgaatacaccaccagctttcccgatttccagcgtgcaaatggcagatcgtgagacttctcagcttccataattacatgagccaatttatatatataaattgggtcctccagaaaaacagaataaattatatatataattatacgcataacttaattaaattatacgtataacttagctatatatataatttattctgtttttctgaagaaccctactgacacaaatgttgagcatcttttcatgtgcttattggcttaataacttgtacatcttctttggggaaatgtctattcaagttctttgcccattttgtaactgaactattaatatttgtctttacattgttgagttgtaaaagttccttatatattctagatactagagccttatcagatatatttctgcaactattttctcctaatatataggttgtgtttttattttctttttctttttttttttattgagacagtctcactctgtcacccaggctggagtgcagtggcatgatcttggctcactgcagactcgacctgccaggctcaagcaattctcccacttcagcctcctgagtagctgaggttataggcacttgccatcgcacccagctaatttttgtattttttagtagagccgaggtttcgccatgttgcctaggttggtcttgaactccctgcctcaaagcgatctgtcagcctcagtctccctaagtgctggaagtacaggtgtgagccacagtgcccggccatctattttcaatagtgttttttgatgtacacaggtttggaattttgataatgttcaattcatccatttttttttttttttttttggttctttctactggaccaccactcttgagccctctaatccaacctccacgcggcagccagagggagctctctaaatgtaattactctttccctgctccacctgctcaaaacagtgtcacatttgtgatttaaaacagtatttctcaaacctaatttgcaaacaaagcaggtggaactcttcttgtatgcacagcatctgatttggttggtctggcatgggtctgggagtgagcacacctaccaagcggctgctggggtaacttgcgttttccactgatgatttcagcaatgtttccggtcccacatgctcctccagaaccttgtactcccccatgaaaaggtggagtccatttccccttcctttatttatttttttgagacgaagtttcactcttgttgcccaggctggagcgcaatggcgtgatctcagctcaccgcaacctccgcctcctgggttcaagcaatgcttctacctcagcctcccgagtagctgggattacaggtatgtgccaccacgcccagctaattttgtatttttagtagagacggggtttctccatgtcggccaggctggtctcaaactcccgacctcaggtgatccgcccgcctcagcctcccaaagtgctgggattacaggcgggagccaccgcgcccggctatttccccttcctttgaacctgatcaggacttgacgatggcatcaacatggtgagagtgaccctgcatggcttatgaggctgggttacacaaggcgatgttgcttctgactggctccctctcaggatacatgcccttggaacccatcctctaagctccttgggagcccaacttagcccatgtggagacaagacagggagagaaacagaggcacccccagccctcagccagcatcaaccgccagacaggagagcaaatgcgccaacaatgattccagctgaagcctcagacagcgtggagcagagatgagggatccctgcagattgcagatgcgtgagcaaaatgcatgctgtcactgttttgaaacaacaatgtctgggggctgtttgttatgcagcaatagacagctgtaacaatgctgttactgctgtattccatgaatgactgcactttgagtagcagggggctagatcactagataagccccatggcttctgtgtatgctatttttctacttttatatccttttcattcactttttttttttttttttttgagacagagtctcactctgttgcccaggtgggagtgcagtggtgcaatcttggcggactgcaacctccacttcccgggttcaagcaattattgtgcctcagcctcctgagtagctgcgactatagatgcacccccatgcctggctagtttccgtatttttagtagagacggggttttgccatgttggccaggctgatctcagactcctgacctcaggtgatccacccaccttggcctcccaaagtgctgggattacaggcgtgaaccactgcacccagcctcattcactttctttacttggctcatttttccttgttgcctcaattctcctctaagatcactttcctgacatttcagcctgggcctgttgccttctctgggtcccctccgcctcctgtgcctcccccatctcagccttgatccctcagattatacttcctctgtccccaccctgaccatcttggctgtccctggatagggatgggtatcttctcccactggtctgggagatctggaaggacaggcctggaaaagacttggtcactgctggaaggagctcagttagtgtggtgctgaggacagtacgggtgaggctggccccttcacccaaactcccactctcttccatagatttcacctctgtggcccaggccataggattagggcaactccccttaaacatcgagtccatcctccaagctgtccttttttttttttttttttttttttttgagacagagtctcgctctgttgcccaggctggagtgcagtggcgcgatctcggctcactgcaagctccacctccagggttcactccattctcctgcctcagcctcccgagtagctgggactacaggagcctgccaccacacccggctaattttttgtatttttagttgagacggggtttcaccgtgttagtcaggatggtctcgatctcctgacctcgtgatccgcccgcctcggcctcccaaagtgctgggattacaggcgtgagccatcgcgcccggcctcatgctgttcttgaatagtgagcacctgttacaagtcgccccaccagcctctcacttgtacccccctcatctctttctccccaagagacagaggaccctggcacttgtgaagcatgacccagaccctggggccatggcatccaacatcctcattccccatgacccctactgtctagatgtagctgccaagagacccccagactccccgggcctctgtctagagtgccaagacagagagagaatgccctgccgcttgcatgctttgtggggtgtccttcccccttccctggctgctaggcgtgacttcaacgttctccccaacccccaaacagcagcactgacaccagctgcagacctggctcaggttagctaatgaggaccaggctggggatggagcctgaacccctaaaccccagtcctgtaccccaccctaatcctggggtctccactggacaaaacgaagcagcttggtttttcgttgttattgtttttgagatagagtatctctctgtctcccaggttggagtgcagtggcgtgatctcagctcactgcagcctccgcctcccgggttcaagtgattcttgtgccgcagcctccccagtagctgggattacaggcgcgtgccaccacacccagctaatttttgtatttttagtagagacagggtttcaccatgttggccaggctggtctgaaactcctgacctcaagtgatttcccagcctcggcctcccaaagtggaagcggcttatttttaaggagaaaactcccgtggaaaggaatcagcacctcctctgtcaacatttcacttctctgaaaagactctcacttccaacagaaagtgctttgtaacacaacaatgaggctgggcgaggtggctcatgcctgtaatcccagcactttgggaagctgaggcgagtggatcacgaggtcagaagttcgagaccagcctgaccaatatggtgaaaccccgtctctactaaaaatacaaaaattagttccgtgtggtggcgtgagcctgtaatcccagctactcaggaggctgaggcaggagaatggcttgaacccaggagatggaggttgcaatgagccgagatcacgccactgcactccagcctgggcaacagagtgagactccgtctcaaaaaaaaaaaaaaaagaatgagaacatatggacacagggaggggaacaatacacacaaacaaaatttagaaacaggtgaaaataattttagtaatatttttactaatactgatatgctcaaaatattattatttcaataagtaatctaaaaattattgagatgtcttatgttcttttcatcatactaagcctttaatatttggtgtgtattttacactcacagcacatctcaatttgcagtccccatgtttcaagcactaaataaccatgtgtgtccggtggctaccatactggacagcgttgatctgaaatcgcatctgtatgcatcaccagcatatttgcagagatccccatctcagcagcacacctgaggctcatctgcgaaagcacctgcaacttctctacaacctcccacatcacctccaaacacatcctcatgtcatctgcaaacacacccatagctcacaggccaatgcctaaatatcattgcaggcaccttcagagaaagcacttactaaaggggtatacttgattccacatctgctttgacctgcaaatctcccttctcctttacatacatttgcatctcatttgtatgtcaatctaaatccactggcagagcctcagatcatcatctcaaagtcaggtggatgtggggctgggcaggcctccaggtgttcctcctcctgcttcctctggggctcttgatcctcctcctcttccttgctgctctcctcctcctcctccaatatggtgaccagttcctcccgcagcgcccccatctccagccccaggctgcacagctgtcccagcagctggacatccactcggcgcaggttcccctgccagtaggaaggggacgtcacagggatgccaccccagagagcaaggggtctctccaggacctgggtgagagcaggtcccaactcatgtcctggccacagcgcctgggcagggtcctcactgtgcccatggaccctaactgccttcctgcttctcagagtgtctcttgatctctaactcttctctttgtctctccatttcattgtccctgacttctctctctctgtctcctccctctcttatctatatctgtccctgtttccctttgtctctgtccccatttattttttgtctttccatgcccctgtctctctgtctttatgtgttgccatttctctgcccctgcctttggctctctttctctcgcttgccctctctctgccctccccaactttctcaaattcagtctgtctctccatctctgttcctgctctccgtctctgcttcccacctctgtccctctcttttgggatctccctgtccccacctctgttcccgtccctcactctatgtctgtctctcggtgtctgtacatgcctctcatgtctctgcttctatctctcagattctgtttttcgatctctggccttctctatttttgttcatttccattcattctcatttcctctctttctctttcccttccaaacccctcactcaccagctcctccctgatccacagcagactatcgcaggcacctccagtgtctgcccctgcagtcctgagggtctgaccagggatttccactggggagacctccctcagggcctgggggggtgggcccagccccggaggcaccagtccagcctgattcagctgcctccacagttccatcgtctctgagctatggctgcaaggagcaggaagtagcaaggtccagggtggcctggtcccctggggagctgtgtgcgtggtggagagtaaagggcagagggagtgggatgggggttcctgggaaaggtatcccaaagtccactcttcagagagaatcagctggccttgtgcttttctttttccttctgaagtctaacctcaactctgctcacagggttcaaacatagcctcttgcagaggtctaactccacccttccctgcctgtctcaggcctgacccctcaggggcgctcagtgtctgtagatgcctggcaccctctgtccttccacctgccccccaccaccacttctccagcctctcctcagcctccatttgacctctggcttgcccatagcttggtccttgcttgtcctcttggcacgggtcatcctagggctttcccaccagtgtgcctttgggggcaggaatggctcccaggggcaccaagacagcaatcccttagctggagtgcctgtgtccaggctgctggcctagggccaagcagccaattctgctgaccctggacttgcctatgggtatattatccctgttgagggtgagggcttctgctgtggaaaagtctgggaagcactgcaggcctctctcggccttggacccttccttcagacccaaggtgcatatatatacatatatataatggtagatcacgaggtcaggagatcaagaccatcctggccacatggtgaaaccccgtctctagtaaaacacaaaaaattagccgggcatgctgccgcgtgcctgtagtcccagctactcgggaggctgaggcaggagaatggtgtgaacccaggaggtggaggttgcagtaagccaagatcacgccactgcattccagcctggcgacagagcaagactccatcttaaaataaacaaatgaacaatatatatatatatgtattttgttttttgagacagagtctcgctctgtcatccaggctggactgcagtggtgcaatcttggctcactgcaacctccgcctcccgggttcaagcgattcccctgcctcagcctcctgaacagctggggttacaggtgcacgccaccacacctggcgaatttttgtatgtttagtggagacggggtttcaccatgttagccaggctggtctcaaacccctgacctcaggtgatctgcccacctcggcctcccaaagtgctgggattacaggcgtgagccaacgcgcccagccccaagtcccttttaccatagaaagtaacatagtcacagtgcccagggattcacaggtatggggagagggttcgttattcagctgccacacccaccttcctaaacctgctgcccttccagtttcctcacgtgcacagccacgcccgtctgcttttagtttctcaatctgttggcttaaccttcaaaacaggcccaggatttgagcacttctcaccattccctctgccccatccccattcatctcttgcctagactgctacagcagcctcttttactggtcccctgcatccacccttgccctctaaggcaagggtccccagtccctgggccaaggaccagtaccagcccctcgcctgctaggaactgggccgcacagcaagagatgagcagcgggtaagtgagcattaccgcctgagctccgcctcctgtcacatcagcagtggcattagattctcataggaggcaaaccctattgtgaactgtgcgtgcgggggatctaggttgcctgctccttatgagaatctaatgcctgatgatctcaggtggaacagtttcatcccaaaaccatccccaccccacccccgacccccagtctatggaaaaattgtcctccacgaaaccagtccctggtaacaaaacggttagggaccgctgctctaaggtacattctccacctggcagaaataatctttacaaaatgtaaatccgattttgacactcccttcttcccactgtgaatagaataaaaccctaccaggcctgcaccgtcagcccctgcccacctctcaacccagtctcctatctctgtctgcaagctggttcccacctcaaggcctctctgctctagaggctacctctccctgcagcgcttttcccctagatctttgaatggctctttccttatcattcacttctacttcaatgtcacctcttcagagaggcctttgctgatggccctacacccagtcacttttttttatctgcttctcatcaaaattgccttgctgattcctttgtttcttattcatcctctcccacatccatcctctcccagcccagaatgttgacttcctgagagagggactgggtctgtcctgctcaccatggtaacctcggcatctagaacagtgcctgccatcacgtggtaggtgctcagtaaatattcttggaactaatgaatgaataattctatccacaagacttcacaatggctcttcatgctgcgatctagctttcaactccaaactggtcttgagatctcacctcagtctctaaccttgacatctaacctcttcacccactctcttacctgaccctaatttttaaaaatgacgtggtcagcttttcagccccctcattccctgtttttaggaggtagtgagtggaagctggaagaataagaaagcttggggagactgcaattgcagtcaggaaagaaaggtactctgccgggaagaacaccccatcttctcctagggaaagattgtggagtcctggggtttgttttgtttttcaattttttgttttaagagacagcgtctcgctctgtcacccaggctggagtgcagtggcgcaatcacagctcactgcaacttcgacctccccggctcaagtgatccccccgcctcagcctcgtgagtagctgggaccacaggcgtgcaccaccacgcccggctaacattttattttttgtggatataaggttgccctatttctttgtggagataaaggctcccctatgttgcccaggctggtctcgaactcctggcttcaagcgatgctttcgcctcggcctccacaaagtgctgggttcacaggtgcgtgagcccgacctgtgtctcgttttgaagctcagggagagggcgctgtgagcaatccctaaaccctttaagagtaaaaagtgcgtgcacctttaagaggacggttagaaaacgcggggcgtggccacaggagaataagttcgcgctgaaccaggagcgtgggataagaccggccccttccggttacgaaaccttagcaagatggcggctccctgggcgtccctgcgcctggtcgcccccatgtggaatgggcgtatcaggggcatccatcgcctgggtgcggcagtggccccagagggcaatcagaagaagaaaaggacaatactccagttcctgaccaactatttctacgatgtggaggctctgagggattacttgctccaaagggagatgtacaaggtgcatgagaaaaatcgatcttacacctggctggagaagcaacatggtccatacggcgcaggtgcctttttcatcctgaagcagggaggcgcagtcaagtttcgagacaaggagtggatcaggccagataagtatggccatttctctcaggagttctggaatttctgtgaagtgcctgtcgaagctgtggatgccggtgactgtgacatcaactacgagggcctggataacctccgaacctccgcaggctggacatctcggacctccctgccgtgtccaaccctggcctcactcagatattggtggaggagatgctgcccaattgcgaggttgtgggagtcgactgggctgagggcctgaagtcagggccggaggagcagcctcgggacacagccagccctgtccctgcctagcctttagccctgtccccactcacgtggcttctcagcgggctgcatggaatgtctggtagctcaccacacttctggcttccatttgtcttcactcaacgtcagggtgggggagtggtgctggccaatcacaggagagagcgtgagttcccagtatttattcctggctgcccttggctaaaggtcacagctcctgtcaccctgtcaggcagccctttccatgcccctgttcaggcctggggaggtaaaggctcaggctgttagtagccgcagagagccacactcaccttgtcaggagactcttctcaaactgtccttatgtgagtgcactgccatttcttgcagggaccctgactgacacaggggctactactgacactttacagggatggttctcccccgtgcagggccgctgtgcccactgcaggacatgcagcatccttcgccccactccactcactaaaggccagcgcaccccaggccccatagtattgctggttatggatttattgactttatgttccaaattcagctttttcagttggctgttttttgaaaggggataagctttgtcagtagagggcaccgaacaggcattataggaggaaaggcgcctccttcgtggttcttgttggttgtgcttctgcctctggacgccgcagtgcatgtggcttccccagcacccagctcctgaagcaccaggcggtcagcagctgcccttggcaccctccagccctcagaagttgcgtaggagacacagcgcctccactgaggcacctctctgggaataacgttccccagcaccccaaatggatttccagtcaattcagaagcattttaccagtgaagccctcattattccagttcactgttaaagccagtaattctctatattaaactttccctgttcggtttatactccggagtataaaccgaacaggctatcagcacccctactagttctaaccacatgactcctcccccttatactaatagctagccaatcccacctatcaaaagaaaccacaacccgaaaaaaactatatattaccatactaatcctactacaactattcctaattataaccttcaccgccacc

SEQ ID NO: 735307 - DNA, 188221 bp, Homo sapiens
ctccaaggctgagggatgaggagacctgctgaggacccagggccttatctttccatcccactccataggtcccagtattgactgatgctgtcttcacctcctagcctcacttttaaccttctggcacccgcccaccactgtccagttcactattgaagccctgccgtccagtgctgcagagggaaaggatgttcttctactggcctgcaatatttcagaaactattcaagcctattattggcacaaggggaaaacggcagaagggagccctctcattgctggttatataacagacattcaagcaaatatcccaggggccgcatacagtggtcgagagacagtataccccaatggatccctgctgttccaaaacatcaccctggaggacgcaggatcctacaccctacgaaccataaatgccagttacgactctgaccaagcaactggccagctccacgtacaccgtgagtgattcccccatacctctgggtgctggcggtcagttctgcttcacacacatgagattgtcaggcctgggctgtgcctgcatccccctctgcattttgtcccgtgttgagatttgggcatttagtgcaggacacacacatggtaggtaaacttcaacagatcagaattcctttcctgcatccaggccctgcagacactgatggcgggggcgggggggcctcagcagggggaggtcagtctcagccaagcaccccatgccctccccatgaacctgaccctgagaaagaccctggagaactgggtcagggcctggcctgagggcgtcctgggaacctcacaaaagcccagcctcaggactcctgactccgtgtgaccccgggaagcctgtgtcagggctggggtgtggtctcctgggcagggcttactgggagcaaggatttaccagatgtctgcgggctgtggttcctgaagcttctcatcagtgagggctcagctcccagagtctcatctagacaaggacagagcctaccactttccctgggactcagcctggagagggcagggggacaggattactagggcattggccccctgaatgaggagcttaagagatgcccttgggcagtcagtggcccaggggtaggaacagaggggagaaaatgttcctggcagcttcttgtccaccggggatcatgcccaggggtgctctcccatggaggcaaataacagatgctgttgatgtgaacacctcctctgtgccaagcttcatgtcagatcctgtgaataatttaaagttcattcacagacaaagtggcaagcctcagaccattttccatttacatattgtatggaggggaaactgaggcacagagagatacagacaccggccacggtgggcagatcgcagctggcagagtcacatgagggctgtctgcagctgctgccacgtcctctccttcatccctggtgccttactaggtgtctgtggaccttagaacagccactggttcggatgttttcttcttaggtgtctacagctcggagggggagattctggtctggagagttatgagtaaatacagaattaatcagttttttcttaactaaatcacctgcctcaacaatcagtcagtgctggggaagttcaggcctcctcgctcaggtccacaccccgcatctctggacatgaaatggcttcgtgtgttttctgatgtgtgggtatcattccaacaggaggataaaggggaggactttgctttctctccccattcacaccctgcaccagccagggcccagtgtgagacacatactccgtagttctctcatgaaggagggagggaatgaatgaaggaatgatctataacctcttcagagacagagacctggatacaagatcctaggaggttctgggcccaacgtgagacacacactctgtagttctcttatgaaggagggagggattgaatgtaggaatgatctataacctcttcagagacagagatgtggatacaagatcctaggaggttctggccacacctgttttctgtccctctagagcctaagacccatgtctcattcatctggcccgtttctcctaaatctgcccctgggagctgagtctcatctgaccctggggctgcagggctgtgggaaggttttcaggggagggatcaggcttgcgggtagtcccacacgtttgccttacaccctggagctctacctggttctcactatgaatatcccataataatcccccctatcctttctggggagtagaaaaaaagtaaatatttaaaaatatgccagagcatctgttcttcttagcaagttcagatagttattagttagcaggaataaatcgttattttaccagagcctcacctgctgggggtttatgggagcctaactgactgaggggggtgggaaatatccaactccagccccctctagccatcatgtcccacctaaaggagagaaaaaactgagaggcacttgtgacattcacagcccagggcacagactctatccaggaccacagaacccctccctccccccactcaccaccgcatcactgaacgcctgctcacccaagttcctgttgcccagtacatcatgtcctggctttcaacaaaaactacaagacagactagaggcaaaaaaaaaaaaaaaaaaaatgcagttcgaaagacagaacaagcatcagaaccagatgcagatgtggcagggatgtggcagggatgttgaaattatcagaccaggaatttaaaacaactctggggccaggagcggtggctcatgcctgtaatcccagcatttgggaggccgaggcaggcagatcacctgaggtcaggagttcgataccagcctggccaacatggcaaaaccccgtctctactaaaaatacaaaaaattaggcaggcatggtggtgggtgcctgtaatcctagatactcggaaggctgaggcaggagaattgcttgaacctgtgaagcggaggttgcggtgagcctagattgtgccactgcactccagcctgggcaacagagcgagattccatctctaaaacaaacaaacaaaaaacaatactggctaatatgctaaaggctgcaatggaaagcatagacaatgtgcagaacagacggatgctgtgagcagagagatggacaggctaagaaagaataacaacagctactatatctatctatctatctatctatctatctatctatctatctatctatctatatatatgtatatatatgctagagatcaaactcactgtaacacctggatctcagagtggttgtgaggatgtttattaggagattaaagagattaaagcagagttatacacagggcgagagctcaactgatgctatcaactagtattcttatttttttgatgttgttattggcaataaaatcaggaacaatgcagtaaaaatttggttttatcatgtacgagttctgtgaccttccttgacttactgaggtactgtaagtctcagattctaactctgcagatggcggtgatgcccctctccctcaaggtgatgtgaggatgagatgagctgtaggtaggttggtgcccactgtgcctggcacatggaaggcccctgaaaatagtcaatgaacatcatccccgctcatcagcatggagttgacagtgagggctcgctctctgtgacaatcatggaatggaaaagaagaaacaagaggaagactgggcgcagtggctcatgcctgtaatcccagcactttgggaggccgaggcgggcagatcatctgaggtcaggagttcaagaccagcctggacaacatggcgaaatttcatctctactaaaaatataaaaattagcctggcatggtggcacaaacctgtaatcccagctacttgggaggctgaggcaagagaatcgcttgaacttgggagatggaggttgcagtgagccgagattgcgtcagtgcactccagtctgggtgacagagcaagactccatccaaaaaaaaaagaaaaagaaaaaagcaacagagggaagaggtgtgacatgagaggaagaagggatttaaaggtacaggagcagggcgaggtgcaagcacctgtgggagaatgtaggagttggtacatcccagtgtgtcaagtctgagacacagaaaatggtgcaaccgtggagagcaagggagtcagctatgaggacagcccaacagaccacactcaggctctggagcatttccttcctccctgactatgcccctgccctgcaatgccccttatggtttcccttggaacaaacttgggccttgtcccctttgccttcccctttctgcagaaaacaacgtcccaggccttcctgtgggggccgtcgctggcatcgtgactggggtcctggttggggtggctctggtggccgccctggtgtgttttctgcttctctccaggactggaaggtaccgcagcttttccccagcctcctcccacccctaggctgaccccagtcagggaggagggagaccccgccctgtattcagggccaggctttccgcatcctcccaaggaatccttccctctcattccatggctcctcccttgccagctgctgatcctaggctgcctcttcctttatgaatgtggcacagttaaggttgcacccctgagtgctgtcctagttccctaacacagcaaagccacagctgcctggagggaggaagggagggagggagggagggagataagacgggagtgctcagaacctggtaccttctgctgttcattgaatttacccacccagtgaggagggatttgcaggcttgagatccatggtgggggtcctgggcatggtcacgcagtggggagtggcaaagcctggacaggctgggtagggtcagcaccccatcgtgattgatgtccctgaggtgtgagatgggagaacctggacctcaggacctgctgtcctttatgtctcttgccaaggggtggagagagagaggacaaggccattgccccatttcagcatctccaggcctgaaaggagggtctggccatggcagggatactgagttctgggagaatatgatacatgctccttgcctccccatgcccccagctcccccagtgtcctgcacacacagccggccctgctttccctctggggccttgacccttcctctcaggcaaacgcaggtggtctgattccctccctgagtcctcagtccctttcctgggtccctgggtcaatgttctcctcacccggcatctgcctgggggggtccttcctctctggccaggacagacgtgactgcttaaggcctatcctcagctccccgtcctcggccgctcctaccacgaaactgatggagacaggaggccttcactccagtccttgaaaatggagtcccttccttgtcctttattctgcccctaaacctgtgatttctccctgcaccctcatgaataatcctgacctttcctagggccagcatccagcgtgacctcagggagcagccgcccccagcctccacccctggtgagtgtcccttcagcccaggtgtgggagcccctaggcctgccctacggtgtccactcctgccagtcaccccctgggggcctctgaccctttctttggggctgcaaggaggatgtcaggaaacatgacacaggggaccccgactgtcttgttcagactgatctgtgggctctgggtcgtgggtcacctcctcgacctcagctgctcaggtctcccctgggaagaggctccctctccctgattctctgggagctgaggacccctacactctcctgcaggaggggcccaggctctcctcccaccctgctgctcactcctgtctctgtccccaggccatggtccctctcacagatccaccttctcggtaagcctgttccctccccagcccttttctactggggtcccaacagtgcaggctcagggcagggggaccatcaaccccacagcacagcactgacccacctttccccagaacagtcaggtcaaagtgagtgcctccagccaggatccgggcctctctacagggccaggaccacccacgccatgtgctgacccctccccgggaccctctacacctgaggagaaccctggagtccagcaggtgcagaatggacactgggaccatcagtcagaggcccacattaacaagggtgcggggtgggcccagccaggacaggggtcagggtgttgtgtccacactgggaggctgagctcaggggcagagctggtcaatcctgaggggaaatgagtggaagtggaggcagggaagtaagtcctggccgatcagagacaggaaccttccaggctgggcttccgtgaccctccctccctgtcccctgacatctcctctctcccctgcccaggcccctctacccagccccagaacagccactcccatctatgaggtgagtgtgggccatggatgttctggtcccgcaggctccaggggacccaggatctgcccccaccagcacctggctgagctcagattcaggaaaatgcagtgaaaatgagaacaggtggtggtgagcagaggagggaggggcctgggaacagggaccccctgagcacagccaggttcagccccagagaagccctgggtgggcccagagcctgggagatgccagacactgttctgagaaggctacaggggttgaggcctcttctctgtttttacaggaattgctatactctgatgcaaacatttactgccagatcgaccacaaagcagatgtggtctcttaggttcctctgggagctgctcttgtgggttgatggagcgtccccaaagctcccagccctggggacggggaaggacatggagcctgagccagagaaccagctctgagtcctgaggagacacaggcctggggacagggagggatgggagtccctgctgaatatctggagaccctgacaggttgccctgggctctgggtgggccgggacaaaggcctctcatcaccacaggaagcgggggcttgcaaggaaagtgaatgggcctgtggcccacccggggtcaccaggaaaggatctgaataaagaggacccttcctctcattggctctttttctgctcacgggaacttagcagaaactcacctgaaactccgtgtccattctctcccgggtcacacagggaaaatatctccaccttgtctcaaccacagtctctcttccctgggaggcagaaataggggttgggagtcaggctggggtgggccctacacaggaaagggcaagattcacatgagccctgcccagccagccgagcgctcagctgtcctcacactaccccagggaccaaggccatgcacagccccagcctgggtccctctgtgaatgcatgtggggtctcaggagcacagaagatggggccatctgatgtccacaaaaggtgagcaatgcgggagcaaccatgggtggtataggttgcggctgtggcccctacgcagcctccagtgtcctgacccctgctgccctcttcacccaggccctggaggcccagtctatcactgtcctccacaaatgaacttacctgtccccaaatccaggatcctgtgtgcttatacctggccactaggttctcctctgtcccagtggctactgctcaggacatctttatccctggtggggcacagagaggggctgtcagagcaaccaagattaatacagacgcataattcagtccttgagcactacccaggactctggcccctcattgctcatcagttcccactttaccccctggcatggatctcactgagcaagccaactctttacacaggagcatccaggtcagaggtgcaggactcccccatctaaagctcatgcaggctcccatggcgatgggacaacctgtctgctcctctccctggcccacagccctatctcgcctgcagctcctccacacacctgggacagcagttctcagcccttccctgagggcccctggaagggtgatgatctcatataggttcacttgaaccaggtgccaccttcccacaagtgagctggtgcctgcactaaagcacagagccacagttcccaagagtgttctgccactgccacaggtcccaagagtgttctgccactgccacaggttgttcgtcctgagatgagaggtaagaaaacaacccgcaatgggttgttttatatcgggatttgcatcaggatttagctctaaatgacccctgatcccacctgcacacagcgtcagatgagacaaggtgaggcctctttagttttctgttgaggctgtgacaaattaccacaagcttagtgacatagaaacctgaaccaaagtgcccacatggctgtgttctttctagaggctccagggaagagtgcatttcctctccttttccacctcctagaggcctcctgcaaccttggctgtgtcctctttctccatcttcaaagccagcagcacagcatcttgaaactattctgtgccctgcttccatccccacatctccacctcctcccacctccctctctcacttaaaaggaaggagccttgtggttattttggacgcacctgggataaaccacaacaacctccccatctcatgatccttcctttaatctgtaaagtgtcctttaccacgtgacatgtccacagatctggggatgaggatgtacacatctttgagaggcccttgttctgtccatcactcctctcaaggccatcttctcatcatcgttcactacaaactacacatgggcacctggatgggttcatcatgactgtggcgtcagttcctgcattaacatccccagcaccctccagatcctgagagagggagacggagggctctccatgcccctagtacctctccaccttcttcttggtgacatgcttagttgctaagaataacagaaagcggaggtgactgaaagatcacaactcaccggcccttcaatagttcgtggacatcagcaccacggacagtgactcagtgaggctaatttccaggtggcagcagggagcatgcagataggagggaactgcaggaaaagctgcccattctattctatatgagaaagagtgtaagaaagaggaagctattacagggataatgctattcttctctaatccataaattgcgaaacctttgcatgtctggatatcatggtttttagcacatctgctgccactccctgcagggctgattgctgcatccaggatgtggtctcttggggggctcacagcctgctttggcctcatggtgagtctccctgcccctgacactcaggccactgtctctgcctacaacatggtgggaaccttccatgattaacgtctgattctctgtgcctgacctttgaagcacatccatcactcagcctggagcatccgctgagctcagcatcctgctcctccatccccagctgagcccttgaggagatgcttgagaggatctcctgggctcctctgtgagctcctccaggctgagccttgtgcttggtgtcagaggcctttgccatctgcttgttctttccataggcaaataatcctcctcagggacaagtggggcctgaagatctgtctgaatatctatctatctatctatctatctatctatctatctatctatctatcatctatctatatgtatgtatatatgagaatgctttattaggcaaaactgcatactatgaacatgctttaaaatgcaacaggatgagatgtgaagacataaagaacaagtgtgtagtgacacatggctatcagaacacactgaagaatccacaccgcggccgagagcagtggctcacgcctgtagtcccagcacttttggaggctgaggcaggcagatcacttgaggacaggtgttcgagaccagcctgaccaacatggtgaaaccccatctctactaaaaatacaaaaaatttagccgggcctggtggctcatgcctgtagtcctggctgttcgggaggctgaggcaggagaattgcctgaacctgggagacacaagttgcagtgagctgagatcgcaccactgcactccagcctgggagatagagtgaggctccatctaaaaacaaaacaaaacaaaaagaatccacactgcttccccgcttcactttacccagaaaaggaatgttctaggccacttcctcttcagcacacatccccagggaactaaaataggttcacagtcacccccatcttcctcattcccatcacctcttacccacagaggcatctctggtcctacagatccagccctgccttcaagaggcacaggtccaacccatccagtgtccctgctagtcacacacagcactcagggtacaatggagggcttctgtgctttggatgggaacaaaccccacctcacattcccacacctgagaagccaccagggtcctctctgtcctgtcctcacactcaatgtctgtcctgggtcacccttgtcatctctcctggaaataggcatggctcctgacaggtaggattgaggctttgtcttttcaggagtccctcccactctgagcacatgaaactgctcagctccatgcaaccctctctcaccaggggccttgttctctgggtccctgaatacctgggtccatgccatgtacattttaagaaaaatgacagtgactctcaccctgacatcctcacccaaggcacgtgtctgacaagaatcaccaggtgagatacctgtggctccacacacctgaggcttcactgcgcaggggtgtcctcatccctctcctcccacccctagggacagtaagcaccacaggctgccttggaccaccagctccccctcccagacacagcctcagatctatactgacatgctacatggagaggctctgatgaacagcaggtattaggaaatcccaccgaaccaggtgccacttgcggccccactcctcctcatatctgtgactgggacagacacacataacacacctctgttcaccgcccagcccccaaggtcaatcacagtctgcttctcccctagatccactgctccccatgtcttccgtcctcagctgcatcctgggtggcctccttgctgttcttgtaccccagaggcaggttccaacctttgtgatgttgcctgcaatgcccaaactttcccttccccttccccttcccttttcccctcccccttcccctccccttcccctccccacccctatcccttcgtcttcccttgtcttcccttcccttccctataaagccaaacatacccatccacctaccttgtggtcaaagtcatcagcctcctgctccactcagtgttctctgaccctgcatatggaggtggtggcccctcctagaacacccaccactcactgtcagccttgcgtggtaatcacagattttgcaggggttacctgtgttcaggtgtgtcacctgtggaaccagaactcttggaaggactggcagagggagctgcttaggatatctcagggctcctggcatctggtctaccacagggctattaacaacagcacttagggacaaggtggaggatggacggttaagagggtaaatatggatgatgtgtgggcaaagaataggacacaggaacacatgcagtactcaaataattatgccaagaaaggtgaggacatggagatggacattcccatatacttctgatgggactgcagtttagtccctacagcaacattgacctcatcatgtttaacgcgcacacgctctgaccactatcctacttctgaaggcctccctgtgctgtgagctctgagaaggccaagcttgcctgttctgtctctgctaaagccagagaccagccaatagcccagcacagggtacttcataaatacatgttgaaggaatgagctccaggaacagtactccacatggtagagatgtgtgtatgaggatgttcactgcagaaggtcatgtcaatgtgacaagtgacgagcagcctcaaatccagcaacaggggtgtgggtaaaagatcatagtgtagccatgcaatggaaccaatgaaaaaaccacaattagagcaaatccacatgtattaataaaggaggtgccctccatacatgctgcacctaacagaatgttgccaaataagaatgaaaaatgatgatatttgggctgtaaaaactagaagtcagctaaataagaatgcatcgaaagtatttgtgaatgcttacaattttataatgccttggcatccgttttggatggaagttggactttctcataccagaagcagggctcagtcacctttgaaatagtttccagttctccacctccttccagttcctcagtgtgattgatcagatatctgatttatacaactgcctcctggtgacctcctccctatgggacttccggatacagcccgtatgactgccccactgaccccacaccctgcctgctgcagtgaccacctctaattacctggatctcatgtctgcttgcattaaatccaccaattaaaactccctgaggacaatctgtttgaataatattctgtaccctaataaaggccttgacccatgggttccccctctgtcctccccatactgcccctgacctctgtgtgtgtgtgtgggtgtgggtgtatgtgtgtgtgtgtgtgtgtgtcctccagacagggcctgtatcccccaggacctgtaagtaataaatctttattttcatcttatgtctctcgcaatcattggcaagagctctgcatcttaaagatcgcaaatttaagaaattggtgtagtcggcacaatagagtacctcttctgtttagcacaagatatctcggagctgctgaggcttttaacatcctcgccggtgtggctgcctcactggtgaggccgttctgttcagtgcaattcagttgctccactgtgtgctgctgtgttgctgctgtagagtgctgccatgttgttctccccaaattgttaccgagtaggaacctgtaatgtgctcccaaggtggtctaccccatgagaagggggattctccatctagggcaagggctaggtgtgtttctggaatcctaatagggaaggcatccacagagggtgaactccactcctccttagagtgaggagtgacatttcccatttattttccccatggaggtgccatgtattgactttttctttcactgtcccaaggttgagccaaggtgagctatggagaccagggcaagataccatttctgttagcaaagcaaatgggtgacaacgtgtggagaagctgtggttctcctgatggatatagcagagtgccatttagtaaaatcttgtcaggaggctgcccctggttagaccggcagtgtctgtagtcactaaggtggatgcgaattttaggccctgggccatggataatccctgcagacacagccgtggcttcatgtgatggggcaatcccgggctagtggctcccttgtttctgcatttcttgctgtggttgcacaatcaacacctcaggggttgattgggtcaccttggaaagagaaacagctgcctaggaggctggtgcacatggaggccaccctcaattttattctgctaacaagttgtaagattaaaacaacagggggctttgggtaccatcaggaacttgtcaagtaaacatccaaagacagaaagaagaaaaagaaaaagacattaaccgtctagaaatacaagccattttaaagattttgcttaaaagatgcgcttgggctgggagcggtggctcacacctgtaatcccagcactttgggaggccaaggtgggtggatcgactgaggtcaggagttcaagaccagcctgaccaacatggtgaaacctcgcctctactaaaaatacaaaaaattagcagggcatggtggcaggtgcctgtaatcccagctacttgggtggagaatcgcttgaacccgggaggcagagacggcagtgagccaagatcgcaccactgtactccagtctgggcgacagagtgagacttcatctcaaaaaaaaaaaaaaaaaaaaaaaaaagacgggcttgtttcgtcgttgtggagtcatcccagagagaggctactccctagagtcactgaccacctttcctcctccatcttttcctcttatcattctagagacagaaaacaagaatctcagctttaggtggctaacctcaccccccaagaaaagaaactaccactttgattgactacaaatccaagaaaaataaaagagaaactttaaaaagtactgagcaaaccacaggtctagcaaacataatgctagccctaggttacttattcatttacaacaaacccctagatataggaggaaaaaataaaaggtaattaaatatatacacatacaatattttaatataaatatataataaatagttaaattatgtatgtataatatgtaactaaatcaaagtaaaatttcatactttgattctattggaaattcaaaattcatttattaacttatatattaaggaatttatgtaaaaaaagatttttaaaagggcaccaatttgcttttgtgtctctacaacataggatctaatttaactttacatttgctaaatacactaattgacaaatattcatggatttaatcaatactggggctcaaattgtagccacacgtgggaatcccataaatttaaacactctgtccctattatcttgagaagaaaactaaatataaaattgaaaaaaacaggtatgtctcaatttacctgtaactttgcctaaatttcccggagtcatatacccattgctgtaaaacattctctattggacataggtgctctgagacaataaataaaatagaagtgtttttggtacttagacattggcttgacaaaatgggatcccatgaaacctcagttaagatagtgaatacggcccaatgtgagttgaaatggggcctttaaggattaaaacttattacatgaaacctagtaagtaatggggtgattatccatactgcttctccatttcatagcccaattttgacagttgtcaaatctggaaaaaacaaacaaacaaacaaaaaaacccctgggaatctgttgcctcacagagacacaaagtagacatcaaaattgtatatctcagttccagttccaaaatggtggcatagaagcaagctggctttactccttcacacagaaaaccaaaaacaaatatacagcaccaaaattattaccagatatattccagaactcaaatatgaaaatgaaacagttttcagagccacagagaagtgaaaaaaactcccgacagatgacaaaagaatcagatttccccatctgtaatgtccctccctgccccattctgcctggtaccaggtgtgtggaaaattttaccccaactcatggtttctacactgggaaatgtaagatcaatgcgggcaaccagtttctgcacaatcctgggttccctgtccctgccttaacccacaagaagcattgtgagtgcccgaagggagaaatttccctgaggacagtcaaagagtggggaggcaggactaccatctccttccctggaaactctgctgtgtaactcagccaagggagacatgaaatcagactggtgtttcagcagctccatgttgtagtaggtttgtttcacaggtatcctgggcatggacatctagccagctttcccacactgccaggatatcccctttgggacctccctcagttaggaagggcacactctgatcatttactagggccaaggtaaaccctaaaggtaacttagagatgaaaaggaggtagtgacctagcagtaaagaactctaagaaaatctatccaataaaaatcaaaacaagccagacaaagactaaaataaataatgaatccttcaatgtaaagacctggacttacatccacaagaaacagtaagcaggtaaccatgatctccccacatggacaaagtgaggaacaagtgactgatcctgatgagatggtgatgtgtgagctctctaatcaagaattcaaaactgcagttttaaggaaactcaatgatcttcaagaaaacatggaaaagcagttcagaaatttatcagagaaatttaacgaagggattgaaataatttaaagaaaacaaacaggaatcttggaattgagaaatatatttgctgaacaggaaaatttattagagtctctcaacagcagaatggatcagaggaaagaatcaacccaaataagactcccccaaggcataaaataatcgaattctcaaaagtcaagggcaaagagaagattttaaaacagaaagagaaaagaagcaaatggcataaagaagctccaattctgtggcaacagattttcagtggaaatcatacagaccaggagggagtgacatgacattctcaaaatgctgaaaaaatattgacatttgagaatactttatccagtgaagttatccttcaatataaaggagagagaaagtttcctagacaaacaaaagctgagataattcacaccatcagactagtcttcctgtaaatactaaagggtaaatactaaatacttcaatgtgaaagtaaaaaaaaaaacactaacatgcaaaacaaccacaacaacaataacaacatttgaaggtataaaatccactggtgaaattaagtacgtagacaaacccagaatactcaaatagtaattgtggaaagtaatccaatcataactctagcatgagtctcaaaatataaatctatcaaaaacaataatacattttaggaggccaaggttggcagattccttgaggtcaagagttcaagaccagcctggtcaaaatggtgaaaccccatctctaccaaaaaatacaaaaatttgcagggtatggtagcacatgcctgtcgtttcagctatttgggaggctgaggcaggagaattgcttgaacccaggaggtggaggttgcagtgagctgagattgcactactgcactccagcctgggtgacagagggagactctgtcttaaaaaaaaatagctacctgtttggagaaaggtaatataaaatatgtaaatagagacaaagtcaaaatttgcaaaggatgaaattaaagagtagagtttttttggggggttttctgtttctattattttatttgtgatctaagataagttgttaccttttcttctcttgaagatactttgttatatctatgtttttggaagtcttatggtaactgcaacgcaaaaaatctatgatagatccactgaaaataaaaaacaatgacttaaaacatactaccagagacaatcaaccacaaggaagacagtaaaaaatgaagaaaggaagaggggagttacaaaacaaccagaaaacaggcaacaaagtggcagtagtaagttcttacttaaaaatattgaacactgaatataaatggactctattctccaattaaaaggcatagagtggctgaatgctgcctatatgctgcctacaagaaaccacttcatgtaaaaagatacaaatagactgaaagtgaagggggtggaaaaagatatttcatgcaagtggaaaccaaaagagagcaggagtagctatactgatatgagataaactacaaatcaaagactataaaaagagacaaagaaagtcactatgtaatgataaagcgctcagttcagcaagaggagatgccaattataaatatctatgcatccaacacttgagctcccaagtctcccaagtatttaaagcaaacaatagtggatctaaaaggagagatagactgaatacaatattaattaggggactttaacaccctgctctcagcaatggccagatctttcagacagaaaatcaacaaggaaacttcaaagttaaactacacactagatcaaataggcctaactggcatttacgggacatttcactaactatctaactgttacagaattcacattattttcatcagcacatagaacattcttcagaacagaccacatcttaagtcccaaaaccagtcagaataaattcaaaaaagtttatatcacatcaagcatttgttctgaccacaatggaataaaactacaataaatgaataactttctggacacatacaacctaccaagatggaagcatgaaaaggcagaaaaacccaacaaaccaacatgaaactgtaacaaaaggaaaacccaggaccgaatgacttcactgctgaattctaccaaacatttaataagaactaaaaccaattctactcaaaatgctttaaaaaattgaagaggatggaacactttcaaactcattctacaaggtcagcattatcctgataccaaaaccagacaaggacaggacaaaaacaaacaaacaaacaaacaaacaaacaaacaaaaaaacactacaggattgcttgaggccaggagtttgagatcagcctgggcaacatagtcagaaccaatctcttaaaaaaaaaaaaaaagaaaaaaattagccaggcatggtggcatgtgcctttagtcctagctactcgggaggctgaggtgagaggaccaattgagcccaggaggttgaggccgcagtgagccatgtttgtgtcactgtactccagcctggggaacagagcaagatgctctctcaaaaacaaaaagcaagctgggtgtggtggctcctgcctgtaatcacagcactttggaaggctgaggtgggagaactgcttaagcccaggagttcaagaccagtctggacaacatagggggactccatctctcaaaaacaaccaaccaaaacaaagccaaaaaagaacataggccaacatcactaacaaacatagatgtaaaagtcctcaataaaatattaacaaaccatgtttagaaacacatcaaaagagatcattcactatgattaagtgagattcatcccagggatgccagtatggctcaacatatgcaaatcaataaatgtgatccatcacattaaagagaaccaagaacaaaaaccatataatcactccagcaagtgcagaaaaggcatttaataaaagaatgggttgagggagtggagcccatagtcagagcagcagtggtctgggattttggaagtagaaagaagggcagcaccactggccaggaccaccagggaacacccccataggccctgggtgttgtgctccagggagggttccctctggagttattaatcttggtgtccactttgcccagctgcccctcacagggtcagggaggatgaagggaaagcttccttctaatgaaagttcagggactcacagttcctagagcctgtagggagaggaagatcttcgaggaagagcacctgggcattggggcgtttgagaggaagatctatgccaggtccaagtggacaacctgtggactctctctccagggacatacgggtatctgggaatctcctgtagcttaaagaggtaaagacctctccctttagcctgaggactggaggatgctggttcaggtgaatgagtcctgcaggggctggtacaggcctggagggtggtggtgtccagggccttgggttcacccttagcatgattcaggccgggcggtgtttcacatgagcaagagggcctgggttcattgcttcaggacaatggtgaaatctcatggtggaagaaatcttgtccttgccagtgcccagctttcatttggtcttggcccagagtgtcctccctagagaagactcttgtcccttcttcacactgcccttcagggatatgccagccttatgggataagatggggtggagactgtagatgtgggtgggaatctctccacagagtgctccttctctcagcggttgcaccttgtctcagggcttcagcttgaaatctgggatctccaagcccttccctccccagtcctggccaggaccacatgggcagatgcattgtgtgaagtgcatttcatttggggtgtcctctctgcatggcaccctcccgttgattctctttgcgcatgtcagagtgcaggcaccatccacacctcctgctggaggagggacggagctgttgactcctgagagctgatcatgtgttcccaccctcacacacaatcatggtccatcctctgagggacatgtgttgccaccactgtggagatggtgcaactgacagtaacaaacagtaaaatctggtactgaatgggaccttaagccaacaatgacaatgtcattccaaggtgtttcatttttattgattcaatgcaagtcacctgatttcattgactattcacaatagctcgataaagtaaatgcatcatcaccaccactttaaagaggaaaaaggtgcttgggcagtttgtgactactgtggtggctgctgcattgctctctggtaaagccaagtaggtggtgggtgcggcctctgggctgggatgatccaccctcctggtggtggcaggggagccaagctggagccatggcctgtgcagtggtagcagctgaactgaccgctgctgcaggatttgcaagctgttacattttgcgaagccatgaagcacataaaacctcaagtagaacaagtgtttcaaagtctaccaaaatctgccttcagagattattactacagaggtggatatgaacccaaaatgacaaaacgggaagcagcattaatactagataatgaatgaacactagtaatagtagggtaagccctactgccaataaagaaaaaaataagagatgctcattaacatgttatgctcttaaatcacgcagacaaaagagggtctccttatatagtagccacaatcaatgaagctaaagatttactgcaagatcaagctaaaaacagtaggtgtataatgaatttttaacttcatattagtttatgtatatgaatatcaagtttttataataaaatgcctccaaacaaagaatatttgatttagggtttaataacttctaagaggggactcagatgtttcctgtttcacagtcagtctgagagggtcatttttcctggagctgacctgggtggaggcctcacactgatactccccagcatcctctctcctgatggggtttatgctgagcatacagtggccctgggacagctccattctctccatgagtcacagacgctggtcatggaagatccactggataaggttccagagtcatctgtggggcaggtcaggatcacaacatccttttcttctgtgactctggtgttgctgactcagatggggtcggagccactgaccctgtggacaatcagtggaggtgctcaactgaaagtgggctgagggcacgtcttctcctccatccctgggtccttaaggtaactgtggaccccagaccaactgacacaggagctagaaagaaattatttaggaagttagtgagggtaagagcgtccttggcaaggtttcccctttaacaaaaagcagcccaagataattccttttctaacaaagagcagcctgaaaaattgagctacagatgtagatgagcaagatggaagcttgcacaggtgaattccagtaggtgtgccaatagaaaagggctgcctggaagccaggtatgttcaacatggagactccatcctcccttttctccattaccacatgtacagtaaaaaaccaggcaacatggcaccggccaggtagacaatccatctgcatgacaaaagatcagagtggggcagccagcaaatggcacagctggtctaaacaatctttcaccccctgtataaatcagacactgcctcctgaagctcatctataaaaccttctgcatttcactatggaagtggcaacccattttccccaggacccctctctctgtgcagagagctcttctctttctttcccctatgaaacttccactcttaacttcactctgggtgcctgcatcctagttttccatggccatgggacaatgaacctcgagtattaccccagatgaatgatgctgtttcacaatcactggttcagctcccttcttcttagggtttcacagctcggtggggagaataccacgcctcagtggtctggggagtgaggaacaaatgaagaattaatcagattttacttagaacgctatcacctgcctcaaccatcagatccatgttgggaatgtccaggcctcctctcttagatctatacccacttcactggacctgaaatcctgtgtttcccgatgtgttggtgtcactcctatgagaggataaaggagagaactttgctttctctccccactcacaccctgcacaagacagggcccaatatgagacacacactcgctcagtagttctctcatgaaggagggagggagtgacctcgagtgattctgccatctgtagtctgtgtaccctggccagtggctgtatcttcatatgcctcagtttcccctcagtaaaataggacacacaatgagaactaaaaataaaattctaattccccagtgaactgaaaggatggcctcttggccaagcggatcccagagttcctgatcatgacaggatgggaggttacacctcattacagcccctccctttggaagtttagaggtgacaactgactagcattaacgctaaaatcgagatcatgagactgacagaacagactctctgtggccataagataccaaattataaactcaacctaaggtcatgcaggcaagggctaagccacactttcctacatttaaagaataagctatgttctaacacagaattttctttctctctagcggctaaagtaacactagccttcgagataagcaatattgaaatgatcgcggctcatccaccaacactggctaactgacccctgttccaacagccacaactacacttcaattggacaggagactgatttcagtaactttctcctaataagagaccactgagcatggcctggttctgctggtatacagacacggtgcactgagtaccataatgcttgtttcatcttttgatgtataagacctaatttaatacatttaaatctgaattctccaccccaaagtgaacatggggtgcatgtagcatgcatgtttgttgatcacgcatgtgcgtgtacttcctttgtgagtatccatagctccacctataacctgttgaatatgtatacctggccaactcattcagcataaatctatcttccacattcccctcccttgaagtgcctgctattggtctctgctggaggctgcatcttctaccctggggaatggccagcctgcaggctgtaaccctgtgtaagaaataacctggttgggtgcagtggctcacacctgtaatcccagtggtttgggaggttgaagtggtagaatagtttgagctcaggagccagagactagcctgggcagcatagcaagatcctgtctcttaaaaaaattttagggaggagagtgaggatcagaaaaaatacctattggctattatgcttagtacttggatcatgaaataatctgtataccaaacccctgattacatatataacaaacctgcatgcgtatctttgaacctaagataaaagtttgttttaaaaactatctgggtgcagtggtgcatgcctatagttccagctactcgagactgaggtgtgaggagtgcttgagctcgggggattgaggctgcagtgaattatggtcccacctgtgagtagccacttcactcaaacctgggagacagagcaagaaccggtctctaaaaaaaaataaaaatagaaaaataaaatgaaaaatatatgaaataaagtctcctttccaaacgtacagatctccgatttttctgccaacaatgataaatggtcagtggcttgccatgttgtctgtgaattacttttaaaatattcacgatcacctgacctaaaggttggtaccaaggaaccgcctgaatacaccgtctctgattatttgcctccaacagagtgttccctgggcctgatctctggtggacaatgagctgctgggaacatcctctcttctctattcctcccctggggatgctgaccttcccttggagtctcctaagttccccagggcagtcggctaatgtcctagggagcttacctgtcttctccataccaagtctcatgtgaaggacgaggctttgcccttgcccagatgaggctctgggggctgagccctggctggctaccagctgcaagagccatggcccttggacagctggtaaatccttgttcccagtcagccctgcccaagatgcctcaacccagccccggcacaggcttcccagggtcacatggagtcaggatcctgggacaggggactggacaggggtttccagggctgagtttctgaacaggggcttcccaggggtcccctcactccaggatctgacatggtcctacaaggaacgtccatggggaggggacccaggagggggaactgacactgacctccccttactgagcctccccccaaccccatcagactgtccttcctctgtagcaagtgcctgcagggtctggatgcaggaaagaaattctgatctgtggaagtttgtctcccctgtgtgtgtcttgcactaaatgtccaaacccccaaatgggatgtaatgtagagggggacacaggcacagcccaggcctgaaaatcctgtgtgtgtgaagcagaactgacccccaacacccagagctcatgagacatcactgtgtacgtgaaactggccagttacttcttcattcacaagatctgtttttatgacttgtagggtgtaggatcctgtgtcattgttggtgacattctgtatcagcagacatgtattggggtatattgtctctcagcctctgtggcaggtcctggggtaattacttgagttcctagtacatatcctgtaattcccctttgtaccagttgtagccaagcctaaggcagattgtgggtgagtggaagaatctccttgccttctgcagcttcaacagtgacttgggcagtggtaggcaagttccagaaagttaaaagtgaggctaggagtggggagagagcatcagttaatactgggccctatgcattgaggtggaaagatggggccctaggtcctggacaggtctcttcatccctcagccttggagtgtgtgtgtgtgtgtgtgtgtgtgtgtgtgtgtgtgtgtgcgcgcgcgcgcgtgcgtgcgtgtcctactgggccaaggtcagcagcatgacctcccttccttcagtgcctctgaccttggcatttccctgtttggagtccttttccccaggggtctgcctggctccctccctactgccttcaggtcctgctcacattagggcatccttgggagaccccttccctgacacctctagagaccctgggtcttccctttctgacctttcgctgctgtgttccctccagggctcttgtcaatacttgacctcacattctagatacccttgcatgtctgtcttcctccctatgagagcatgagctctgtgagaacagggacttgtgtgatcttggttgcaccccagtgcctgggacaggctgcggactcctgtggatgagctcatgagtgttcccagggcccttcacaacgtgggatttattttccaatggctgaggttgttggctaagagctctgttggagttcaatcaggctggtgggaaaaatattagagatagttatagagatagacacaaatcttcttggaagaccaaaaagtttgcataactttggtaatagatctgactgaaggtggtccctttacctttagttaaacaaattaaagtagtaacaaaggaaggcagagtagtttgtctagccagcttgtttactcatgtgatcttaagactaaccattgatgtgccacaggtgcttaattgctttctacttgggaagtccacaatgtcaattaccctctaacggtgttgactcaagcctttgttaattaatcttactgaataaatatgagtctcactagctgatcaaggccatggtcacaactgtttataggactcagcagggagtctgtaagcggccctgacagactcagctggactggcaaagcaaaatatgtgtgtgtcagtgtacactattcacccgtcccccacagctggtgcccctatatgaggagtgctgccacagagctctgtttagtgtcccttgttttttttcttgagtattaccccaacttaaattgtgattattgtcatctgttttcaacattaactgctcagtgatgattcacttggaaaacattaacaatcgagattgtttcttcactaacaacctcagattatttagattttcctgttgtaatcccttcttcctgtttagtgtccaacagaagccctctgtccctctcaggtccccgttctctccaagaaaccccagccagtctctgtgctccctcctcccatccactcccagggagccctcccctcacctgtgagcagaagcgcctgccagggatgtgcactctgtgaggaggggctgagggaggccccatgggctctgctgtctgctttgtcctcctctgtggagaggagcttgggcttcagaaaataaggaggccagaaagtaaggaacaggctgagaaataatggggatgtgtcgaaaggtcacagatgccaacatctttgtcctatgcaatattatccataaaattacaggtttgagatatgcttaaattttcttctaacatgcattaaaataaacatataacttttaatagttatattaaattgtatttaatataaattaaatgctcttgtcagagctactgtgactgtcagctctgctgtccttcctctctctgtgctaagcctcctcccagggcagaagcacttcccagggccaggggtgggggcggggaaaggtaagtggcaatgaggatctgcacaggtagcctttccgcctcctcccctctcagtcctgcctccttgtcttcttttcctctttttctccaatctacatttcagttccttagaccacgctgtgagaagcaaggcttattgggacccccatcccttaacaggatgacctgtgctccccataagtgacctctgctgtgtctagggattggctctgtcagcacctcacagagagtccctggggcccccaaactcagtgttattttctctatgacacagaaacccctctgggtatgcaaggttttcctcatgttttctaatgtctgggaaggttggatttactcccagcagggaggtcacagagatgtccagggagtggggtcctagaaatggacaaatctagagctaaagcccaggtctacgattttcagttgtttttttctgcagtgctatgtgaccctaatttcctaggagtaactaaaatgcaaacctcagacatttgtagacattttatgatttttctctacagcttgtaccactgttattattatttgctttatgctttttcctaaataaatttactttacaaaacatccttgtcctagtagggtgcaggggctcacgtctgtgatctcagctgcttgagaggttgaggtgggtggattgcttgaggacgggaatttgagacaaaacatctttgtcctatgcaatattatccataaaattacaggtttgagatatgcttaaattttcttctaacatgtattaaaataaacatataacttttaatcatcatattaaattgtatttaatataaatttatatacaatacatttttatataataaattatatatataaatgtatatataatagtttttcttttttgagatggagtctggctctgtctcccaggctggagtgcagtggcacgatctcagctcactgcagcctccgccttctgggttcaaacgattctcctacctcagcctcccgagtagctgggattacaggcgcctgccgccacgcccagctaatttttgtacttttttagtagagatggggtttcgccatgttggccaggctggtctcaaacacctgacttcaggtgatatgccgcctcggcctcccaaagtgctgggattacaggcatgagccaccatgcctggcctatatattttatataattatataaagttttctataataaattttatataataatatataaaatggatatttatttaagataaagttattagttttatatatttacatatatttaggaataaatgtgttactgtgggagcccagtgcccaggcaggtagtcagtacatgatggttgtcattagggttaatactttggaattctggattttttcccaagagagtgtctacgctggaatattgggcttgtggctttctgctgatgtgcatgtgtgaagaagctacttccacttattaggacttgtgtatctgtctcgcagtttcactacctattttctcgtgatgttggtcaagtcgcctaacttttctgtgcctcatttacctaatttgtagaatatgggtaacagtacacaagtgtgagtgtgtatttcccaggactgaccactagagggcgtgaaggcaccggcacttactattacagcaatgggtgtagtagtgctcatggtcgtaaacatcattctcccatgaaaggaaccagggcttcctgggagaaataactgattccagggctggggccggaaagcacaagcggagcctggagcatctcgtgaggccagaaagtaaggagccggctgaaaaataatggagatctgtcgaaaggtcacagatgccaaccagaaggagctttgaatgaccaattttgagacaaaatgagcactataagaaataatgatagtaataaattccaacccataaatacccatgagttcctactaatataaataaataattgaatacataaatatataaggatgaagaaacagctttttcttacagcagaattccaattaatgaatgtagaaggaatgatcaaatagaaaatcactatttggctaacagcacagtcaattgtttgtaggcaagaattatcaatggactttaaatatgaatgggtaaaagtatgatgatgctacaactagtgagtaccaagggggaaaaaaaagtacgttgagaagaaacaggctacttccatattcccaaagtatcacttcaggagctacttattgattataatgggacaaatagtaacttacagtagagaaacctggcaacagagtctctccgaggtacaaaggctctcttcaggaaggaggtaaggggaaggaagaagaaaacactgtcctgcctcaattatttgctttccccattctcaagtgtacttcatagacattcaaagatatgtgttgatagtgtccacgatccacatggctctattatagtcatttattcacacatacattcagtgaggctttgagtgcctaatgtgtgcctgatatttgctagatggtggatgctgagaagatcaggtgtgctgctgtctctagggtgactgaatccacctgccccactttacagatgtggaaattaaagtgaaaaggatttataggattagttcactgtcacaaggtcactagccttaaagttacaggagtaaagcaagtttcctgacttgctagattttctgctgcaggtgctgacaatggtgagctccaataggagagaggacactcagagtgaagtgggagccctgaacaccctggattagccaagaggacatgccgggtccagctgtgaccgcacaaaggaccattggggatatttgtattctctttttcacttagagcttgaaatgaggaaaactaagtgcagaaaaccaagagtggaagatttttcacaaagcactggtaacatgcatcagaaaaccctgtgctgatgtctgtcacggtgtttctcactgaacggtaatagtctggctttgagtgtgttccctctacagcctggagttctgcgaggcagggaccaggtgtgattcatctttgtctctccagtgacagtacacagcaggctctgataaatatttcttacaaaataaaatggaataaaaagtagacatctgcacaggtgtgggatgactgagcagcagcagaagcaggaaaagtcagcgtccccagatcagctgatgtggtgttcggattctagataggggtgaggtgccaggatggggatgggggtcctgtggctctgctgccctgggggacacccctaggtttcacagtgcctgctgtggttgctgcactttgcttccccatgggaaagtgatcagagggtgtggggcttcaggtgaccccatgtgggaaatggccaagggaaggtggggtgggcggcacatggttttttttaaccaatatttgaaggtaggttgtatgaaaaggtgttaggcttatttcagcttatggggagtaggacagggattggtgagtgtgtatcaggtatattttggctcaggatggaaaagaactgtcacagtaacataaggtcttttgggaaattacatgtttactggcagagttcaggccagggctgggtgtctgaaaatacctgtcagggtcacttttatggttacaagggcagagcttggcttggaaccaggtttcttactaataccacatattaagtattataaaaactgtcctttgcaataggacattgctctatgatgcaggttgaggtccctctgtttaagtaattgtgggtggctgtgattctctcatctagtctgcgacttggacttcacctccatctgcagtccctctcctttgctgttgacactggtcagagttaagcgcatttactgacgatggtcacagggtggcagcactgcctctctggtattttctaaaacctcttcctggaactgagccagtctaagaggatgtcatgactaagaaaagggcactaatgaggtgaacagataattttttttttcttgtttctcctgtgaagtaacagagtggaggtgagcatggaataattgccttttagaaatggaagacaatggagagaagtgtttcgcaaaccttaatgtgttcacagatcccacacagatctttttattcaatacagattctgatttttctggtgaggcctgagattgtgcatgtctaaggagcttttggatgatgccattgctgctggttggcggaccacactttgagtagcaaggctcgaagatcatttagaggttaattctcactgcatctaatttatggatgaaaacaaaccaaggtccagagagagcatatacagcttgcctaacaaagccattccctaagtgcctgacttcttgcatttaaacccagggcttcagcctttgtccagttctcactccacacatcacacggtttgttcactgttgtgaacgacagttgtggcagcatctctttagtttaggaatccagagccccaatttcactaccctctttggtcttggctcatgctgtgacttcgaatagttttgcccttacttaaaatcttcagtggctcttttgtaatcacaagatcaagttcgaatatctctgtctagtgttcatggctttataacatatggtatctctttagtaaccttacctaacttccctgttttaaaattgtctcttgctgccatagccctccttgctccttcctgctccctaacaaactgtgttcacttctctctcagtggtagtgatgatggcatggcctctgatgttagactcatgtaacttctaatcccagatccaccaccaacattggcaagttgattcatctttctgaggataagcatcctcctctgaaataaacttagatggcggttgagaggggtaaataaaataacacacaaacccactctcatccctgagaccctcttcaaaactagcatataaaaatagctatttgaagaggttcagtgaaattcaaggtaacacagagaaggaattcagaatcctatcagataaatttaatagactgaaataatttttaaaaatcaggcagaaattctgtagctgaaaaattcaattgacaaaccgaagaatgcactaaatctttcaacagcagaattgatcaagcagaagaaagaatttgtgagcttgaagagataatatatgaaaactcagagtcagagagacaaaagaaaaaagaattaaaagaataatgcatgcctacaaggtttgattattaagctactcaaagagatacaagagaagggtgaaaaccaacataaagaaatgtaaaaaacaatcagaatataaatgaaaaattttctaaaatgctagctagtttttttttgagacaggctcttactctcatcacccatgctggagtgaagtggcacagtcatggctcactgcaggctcaacttcctgggctcagatgattctcccacattagccttccaagtagctaggactaaaggcgtgtgccaccaggccaggctaattttttgtatttttagtagagatggggttttgccatcttacccagggctggtcttgaactcctgggctcaagtgatccaggagattcactgccaaaaaggatataaccaagtcatatagtcataggttatctaaagtcaatgtgaaggcaagaattctaagagcagtgagacaaaagcatcaattaacttataaaggaaaacctatcagtctaacaccagatttctcatcagaaaccttacaaaccagaaggtattggggtcctaatcttttggcttcttaaacagaatagctctcagccaagaatcttgtgtagagtgaaattatatttcaaaatgaaagagagaaatacagtctttttcaggcaagcaaatgcttcaggatttgtcacggctagaccatcctacatggaatgttaaagggacttctaaatcacaaaacaaaagatttaaatagaacagaatagaacctcttgaaaccaaaaaattcaaatggcctataaaacaataacacaataagaaaacaaagtagataacgatcaacatgatgactggaacaaatattaacattgaatgtaaatgacctaacactccacttaaaagacacagattggcaagataaataaaaaatcacaaaccaaatatcagctgtcttcaagagactcacttaacatgtaaggattcttatagactcaaggtaaagagatgataaaagatattccatgcaaatggaaaccataagtgagaaggaatagctatccttatatcatataaaacagactttaagcaacaacagtaagaaaaagacaaataaggcaactatataatgataaaaggatcaatcaaacaagaagatattacaatcctaaatatatatgcacctaactttggagctcccacattcataaaacggttatgatgagacctaagaaaaaagatcaacacaaaacagtgagggtgtcctgggttttctttttattggacagcagtgtactagcctatcactttcccagtcaggggatttttggtctccccattcccctaccatgggttcatgccaaagtccatattttttattagtgtttggaattggattttttttttttgaggtggagtctcgctctgttgcctaggctggagtgtagtggcacgatctcggctcactaacctctgcctcctgggttcaagcaattcttctgcctcagcctcctgagtacctgggactacaggtgcatgccaccacacccagctaatttttgtatttttagtagaaacgagatttcaccatattgtccaggcttgtatagaactcctgacctcatgtgacagggaaacaggcactcagtgaacttcatgcgattgaggagttaatgataatgagagaagggctgtgaggggacagcactggggacaccagagcctgtgacgggctgagttgctgtgccttgggagatgcccttttgactgagccctgggaaggagggggtgtgggggcaggagctgcctgcagagggagtggcctcaggtgggcggccacctggctgcagggaagaggtgacagagttcgtgtgcagagcttggagggtgaggaggaggtgggttgaggtgaccttggtgagggtgaaccatggggggctgtgggccctgctgagggaggccagccagccctggacctacagggtggtttggtcttttttgtcccattcccagcatccactgagtggtgaaactctgcaggccagggaccatcccactggccagaaggagcgcacagtaggtgcccactcagtgcatgttgggctggacagaacctcactctgccccctgcccccagctttgggagctgcagcaaggtccctccccctagggatctccatgcctctgtctctgaggggtgagatggggagacttcaaagggccatctcagagtgtgggggatagagacgcagaagtgtgggggatagagggaggcctgggctctagacccaaaggaccttacacacctcctgagtcttttcaaatggtttcttctgttactttaaaaatgatgtaagtcatcatatttattgtaaatcccaggaatctaatcatgcgtaaaataaggtgtcttatccttgaccccaccccttccccaattaaatttccaggatgttaccactgtttgcagttggtgtgaatctctctttaataatactctgtttatctcacttgtcgttttacgccaaaatacccattgaattatattattgctgaagaccattcttttttttttttttttttttgagatggattcttgctctgttgcccaggctggagtgcaatggtgtgatctcggctcactgcaacctctgcctcctgggttcaagtgattctcctgcctcagcctcctgagtttctgggattacaggtgcacaccaccacacctggctaatttttgtatttttagtaaagacagggtttcaccatgttggtcaggctggtctcgaactcctgacctcatgatccaccctccttggcctcccaaaatgctgggattacaggcatgagccaccacacctgcccagaccattctgttctactgaatcatgtgtggtgggcacctcttatatcaatacatatggattttatcttgtgtttgttattggctcccctttttctcattgcatggctacactcaatgctttgtccacacccctgttcctgggttggaatcttgtgacagaaaatgaagtaacaaaggctaaagctttctaaagtggagtcaggagattgcaagacaattgcactttcaccagcaagagctcaaaccacagaatgttccaatagatttggataaacagctgaagtcagtattcaccagccttcaacatctcaactaggagaaccctaaaattaactaagcacatagaatggaatggacttgtgatttaggattccttctcagccaatgagctgcttctgaaaacaactttttgtggaaattacctgtaaagaaaaccctctcctgtgcttgtcttacagaacactagtcagggctgccctgattcagtggacccgaattgctattatttgtttcctaaacatatggtattttctgtgaccttcatctcaatcttttttttaagttactgggctgtttcccagttttcataatgacgagacattctgcagtgtttcatacacatgtcttttccccatgtggagtattgatccaggagctcattcagtcaacgcatgtttatgaagcatcctgtgccaggctgtgggctggtcactgtcttcagcagagagaggacaggcacagtcttgccttcacagagctcacagctcagggaggctcttagaagtgggatactggtcggagcatgtgcacattaaacatgatgaggtcaaggttgctatagggactaaaccacagtcccaccaagatcgcattgagttcctgtggtagaccagaggtcagggcccctaagatgtcctgagcagctccctctgctcagaagttttggttccacaggtgacacacctgagcacaggtgacccctgcagaacctgtgattaccacccaaagccaagagtgagtggtgggtgttctaggaggaaccgtcacctccatgggcagggttggggaagactgaggggagcaggtggctgatgactttggccagaaggtagggggatgggcaggtgtgcgctcatagggaagggaagagaagggagggcattgcaggcaacaacacaaaggttggaacctgccttcatggactgagaaaagcagggagtccacccaggctgcagctggggagggaagacatggggagcagtgggtctaggggagaagcagactgcgattgaccttggggactgggcagtgagcagaggtgtgttatgtgtgtctgtccccatcatagatatgaggaggggtgaggccgcgggtggcacctgggtcggtgggatttcatagtgcctgctgttccctagagcctctctgtatagagggtcagaatagatctgaggctgtggtctgggggaaggggctggtggtgcttaccatctctaggggtgggaggagagggatgaggatgcccctgagcagtgaagcctcaaggtgtgtggagccacagttgtctctcattagacatgtgttttgcgtgaggatgccagggcctggtggttattactgttgtcaagtttgcatgacaaggacccaggtatccagggatccagagcacagggcccctggtgaggggatgaggctcagatggggctgaccaggttcatgtggtcagagtgggagggactgatggagagacagagcctcaacccctcctgtcaggagctgtggctatgtccaggagagatgacaaggatgacccaggacattgagtgagtcattgagacattgaaggtgaggacagggcagagaggaccctggtgactgctgaaatgtaggatgtgaggagggctctgacccatgcaagttacaggacctccccacccccgagcccacagatgacccttaaattgggcatcctgagtgctgtgtgtgcccagcagggacactggataggctggacctgagtctctgtaagggcagcgctggtctgtaggaccagagtcttctctgtgggtgtgacgtgggcaggaattagcaagatgggggtgacaaggcttggcttggaggatctggtacagaagcccatgggcttggtcagctcagcttctcaggggctcagctggggctggaggagcaggatgctgtgctcagggcatgctccaggcagcgtgatgtgtgtggttccagggtcaggcacgggggtcaaaaattaaccatgaaaagttcccaccttctgtaggcagagaaaatggcctgattgtcagggtcagggagacttaccatgtggccaaagcaggctctcagcctcccagagaccacaccctgggtgcagcactcagctctgcagggtatggcaatagatgtgccaagaaccccaacatccagatgcatgcaaaaattttgcgatatataaaatagagcagatcaagtttccctgcaataacgttgttcctggttgtgtctttttcttgtaaactagacatggacatctttccagcagtctgttctcatctgccaccttcctgctgcagcacctcagaatgaacattcctgagacactgtccgtggtgctgacgaccaagagctatggaacagagtgtgatgtagaatcttctagttacctctgctctcctttcacttttaacaacagagcatcattaacaatgagaaggtggagaggtgttcaggatcttgaagtgacttctgtcttgctctcccataaccctgaagctgctgtagacattattgcagaaactgacaccacagtcaggatggccttgtccaggagcccatgtgcagtttgtagtgagcaaggatgagaaaatggtcttgaaaggggtgatggacagaacaggggcttttcaaaaatgtcacatcatcacccccagcatccgtgaatctgtcacatggtaagagaccttacagattaaatgaaggattatgagtttggaagattattgtagtttatccagatgggtccaacataatcacagaatcccttccttacaaatgagagagggaggtgggagagtcagagaaggaggaggagatgtggggatagatgcagaagacagagcggtgtcaagatgctgcactgctggctttgaagatggagaaagaggacacagccaaggatgcaggaggcctctaggaggtggaaaaggagaggaaacgcactctgccctggagcctccagaaagaacgcagccatgtgggcaccttggttcaagtttctgtgtcacttagcttgtgggaatttgtcacagcctcaacaggaacctacagaggagtcaccttgtgtgcaggtgggatccagggtcatttacagctaaatcctgatgtaaatattgcaggttgcttttcctacttcctatctcatggccaacaaccctggacaatggcagaacacccttggaaaccacggctctgtgctttagtggagggaccagcttgtttgtgggaaggtagcacctggtccaagtgaacctacatgagatcgttactctccccagggccctcagggaagggctgagaacagctggcccaggtgtgtggaggagctgcaggtgaggcagggctggaggggcctgtgggtccaggtagaggggcagacaggttgtcccatcgccatgggagcctgcacgagctttaggttggggaaccctgctcctctgacctggacgctcctgtgtggagaggaggcttgctcagtgagatccacgccagggggtaaattgggaactgatgggaaatgaggggctagagtcctgggtagtgcctgggaggaccttgctcaaggactgaattcttggtctgttcccaccttggttactctgacaacccctctctgtgtcccacggggataaagatctcctgagcagtggccattgggacagaggagaacctggtggccagagctaagcatccaggatcctggatttggggacaggcaagctcattgctgggggacagtgatagatacggcctccagggcctgggtgaagagagcaggagggctcaggacactggaggctgtgtggaggtcacacccacgatctgtaccacccatggatgctcctgcattgctcacctttgtgtggacatcagatggccccaacttttgcactcctgagacatctcatgcattcacagagggacccaggctggggctgtgcatggccttggtctctagggtagtgtgaggacagctgagcactcagctggctgggcaggactcctgcgaatcctgccctttcctgtgtagggtccaccccagcctgactcctaaccccctactcctgtctttccagggaagagagactggggttgagataaggtggagatatttttcctgtgtgacccaggagagaatggacatggagtttcaggtgagtttctgctaagttcccatgagcagaaaaagagccaatgagaggaagtttcccctttattcagatcctttccaggtgaccccgggtgggccataggcccattcactttccctgcaagcccccgcttcctgtggtgatgggaagccttcgccttggcccacccagagcccggggcagtctgttgaggtctctatatattcagcagggacccccatcccttcctgtccccaggcctgtgtctcctcaggactcagagctggttctctggctcaggctccatgtccttccccatccccagggctgggggcttcagggacgctccatcaacccacaggagcagctcccagaggaacctaagaagccacatctgctttgtggtcgatccagcagtaaatgtttgtgtcagagtgtagcaattccagtaaaaacagagaagaggtcttgacccctgaggccttctcagaacagggtctggcatctctctctgggcccacccagggctactctgggactgaacctggctgtgctcagggggttcctgctcccaggcccctccctcctctgctcaccacctcctgttattttcactgcagtttcctgaacttcagctcagccagatgccagtggggacagatcctgggtctccctggggcccaagggaccagaatatctgtggcccccactcacctcatagatgagagcagctgccctggtgctgggtaggggaatctgggcaggggagagaggggtgtcaggggacagggaaggattcctgctgtgtaggaattccagggctctcctcaggtgatggagggtcccagggtggggttagcacagggagtggatgatcctggccctgaacagaggcccagctcatggccagggcaggtctaaccttatccaagtcattctgggtagggtgggtttgtgctggggattgacagtccccctgccctgagcctgcacagctggggccccagtggaaatgggattgggaacggacagtcttacctaggagatggagctgtcagagggtccatggcctggggacagagacaaaagtgagcacgagagtgttaggatagctgggcccctcctgcaagagtgtgtgggggtcctcagttcttagagaattggggagagggagcctttctcaggttattttaggggtcaagtaagcaagtgaggttgaggaagtgacccatgacccagagcccggaggttagggctgacccggccagttggggtttcctgtgtgatgttttatgggatcctctttgcagccccagggatagggtcagaggcccctgggtgtaactggcaggagtggacaacttggggctggcttagtagttcccagccacacccagactgaagggacactcaccgggggtggaggctgggggctgctgctccctgaagtcactctgatcgctggccctaggaaaggtcagggttatttgtgaaggtgcaaggttaaaagtcacaaattggagttaaaataggggaccaggaaaggagcctatttccaagaggggtatggagacctcctttctttatggagttctgtggtaggaggggcccaggtgaggggagttgaggaaaggccttacaaagccacatctgtcctggccagaggggaaggactctcaggcagatgctgggccaggagaacattgatccagtgacacaggaaagggactgaggacccagggaaggaatcagaccaccaggggttgcctgagaggaagggtcaaggcaccagggggaaagcagggccaggcacatgtgcaggacactgaggggactgcatgcatcttggattctcctggaactcagtgtccctgctgtgaccagacactccactcagggctggagatgctgaaatgggacaatgatcttgtcttctgtctctgccctttggcaagagacataaacgacattccaggatatgccatattggggccccggttctcccttctcacagctcagtgtctgcagttaccatgtcagtcaaaggggtgctgaccccacccagcccgtccaggctgttccagtctccactatgtgataatgcccaggatcccccctcagatgccctctcactgggtggatggattcagtgaacagggggaggtaccaggtattgagcaccgctcccccctgctccaggcagctgtggctttgctgtgctaggaaactaggaccatgctcaggggcatggccttaattggactgaattcactgaggacaaagctgttgaggaagcagcccagggtcagcagctggtgaggaaggtgccatggaatgagagggaaggatccctggggagtcgggaggctggggagagcctggcactgaatacaagacagggtctccttccttctcgcctggggtcagcgtgaaggatgggagcagaatggggaaaagctgtggtacctgccagtttttcggaggagcaggaaacacacaagtgcagccaccagaagactcccaaccaggaccccgatcaggatgcctagagtgttgtcatctgctgaaagaagaaggcaaaggggatgaggtccaaatctgttccagggggaaccatgaggggccttgcagggcaggggcatggtcagggaggaaggaaatgccatggagcctgagtgtggtctgttgtgctgtcctcatagctggctcccttgctctccgtggttgcaccattttctgtgtcttaggcttgaattactgggatgcatcaactcctacattctcccacaggaagcctgcacctcatcctgctcctgtgttttttagtccctccttcctctcacatcactcctcttccccctgtttctttttttccatcccatggcagtcgtaaagggcaggcccttgctgccaactcaatgctgatgagcagggatgatgttcattgactgttttcaggggccttccacatggaaggcacagtgggaatcaatctacctgcagcttttctcaccctcccattgccttgagggagaagggtatgtgatattgtgaaatacgtatttggtgttcatcaccattgatatggttaggctctgtatccccacccaaatctcaccttgaattgtaataatccccatgtgttatgggagggaccttgtgggaggtaattgaatcatgagggtgggttttttccatcctgttcttgtgatagtgaataagtctcaggagatcagatggtttcataaagggaagcttccctacacatgtcctcttgcctgctgccatgtaagacatgcctttcaccttccatcatgattgtgagacctctccagccatgtggaattgtgaatcaattaaacctctttcttcatacattaccaagtctcaggtatgtcttcattagcagtgtgagaatggactaatacagtaaattggtaccagctagtggagtgctgctataaagatacctgaaaatgtggaagtgactttggaactgggtaacaggcagaggttggaacagtttggagggctcagaagaagacacaggaaaaaagtttgaaacttcctagagacttgttgaatggttttgattaaaacgctgatagtgatatggacaataaagtccaagctgaggtggtctcagacagagatgaggaacttcttgggaactggaacaaaggtgactcttgttatactctagaaaagagattggtggtattttgcccctgccctagagatctgcagaactttgaacttgagggaaatgatttagggcaactggtggaaaaaaaattctaagcagcaaagtgttcaagatgtgacttgggtactgttaaaaacactcagttttatgtatttacaaaggtatggtttggaattggaacttatgtttaaaagggaagcagagcataaaagtttggaaaatttgcagcctgatgatgcaatagaaaagaaaaatccattttctgaggagaaattcaagccagctgcagaaatgtgcataaacaatgaagagcaaaatgttaatccccaagacaatggcaaaaatgtctccagggcatgtcagagaccttcctggaagccccttccatcacaggactggaggcctaggaggaaaaaatgtttcctgggccaggcccagggctcccctgctgtgtgcggcctagagacttggtgccctgcatcccagccactccagccatggctaaagagggccaaggtacagctggggccatggcttcagagggtgcaagccccaaaccttggcagcttccatgtggtgttgagcctgcaggtgcacagaagtcaaggattgaggtttgggaaccttcgcctagatttcagaggatgtatgaaaatgcttggatgtccaggtgaaagtttgctgcagaagcagagccctcatggagaacctctgctagggaagtgttgaagggaaatgtggggttggaaccccgacacagagtccctactggggcactgcctaatggagctgtgagaagaagaccacaatcctccagaccccagaatggtagatccactaacagcttgcaccatgcacctagaaaagctgcagacactcaacgccagcctatgaaagcagccaggagtggggctgtaccctgcaaagccacaggggtggagcccaaggctatgggagttcagctcttgcatcagtgtgacctggatgtgagacatggatacaaaggagatcatttcagagcattaagatttggctgccctgctggattttgggcttgcatggggcctgtagcccctttgttttggccagtttctcccatttggaatgggtgtatttacccagtgcctgtacacccattatatctaggaagtaactaagcttgcttttgattttacaggcttataggtggaagggacttgccttgtctcagatgaaactttggacttggacttttgggttaatgctggaatgagttaagactttggggaactgttggaaggcatgattagttttgaaatgtgaggacatgagatttgggaggggtcgggtggaatgacatggtttggctcttcttcacccaaatatcaccttgaattttaataatccccacgtgttgggggaaggacccagtgggaggtaactgaatcatgggggtggattcttcccatgctgttctcatgatagtgaataagtctcacaagatctgatggttttagaaaggggagttcctctacacatgccctcttgcctgccgccatgtaagacatgccttttgccttctgccatgatttcaaggcctccccagctatgtggaactgtaagtcaattaaacctcatttttaaaaaaattacccagtctcaggtatgtctttatcagcagccaagaccagctcggtcgcggagatcctaacccagcagtgctagaggaattaaagacacacatagaaatatagaggtgtgaagtgggaaatcagggttctcacaggcttcagagctgagagccccaaacagagatttacccacatatttaataacagcaaaccagtcattagcattgtttctatagatattaaattaactaaaagtatcccttatgggaaaccaagggatgggccgaattaaaggaataggttgggctagttaactgcaacaggaacacgcccttaagatgcagattgctcatgctattgtttgtggcttaagaacgcctttaagcggttttccaccctgggtgggacaggtattccttgccctcattcctgtaaacccataaccttccagcttgggcattagggccattatgaacatgttacagtgctgcagagattttgtttatgaccagttttggggccagtttatggccagattttggggggcttgctcccaacagactaatacacccattttctggtatgtgactctaaagtccttagaatcttcaaagtgatgtctttttcaagctaataattgactgatgactggcagcccctaggcaacttcagaatgaggctggtcactgacccaggtaggattagagggttgggactttcagcctcacccctaatccctggggagggacctggagtttgaattaatcaccaatgaccaatgaatcaattaatggccaatgattgaatcaattaatggccaatgattaaatcaatcatatctatgtcatgaaccccaaaaggactgggtttgaagagctgaacccatggaagtttctggagtgtggtgcatctggggagggcatggaagctccacaccccttcccacatgccatgctctgtgcatctcttcatctgcatcctttgtaaagtcctttattacaaaccggtaagcctaagtatgtgtttccctgagtcctgagagctgtttgagcaaactaatccaacccaaacagggagtcatggaaacctcaatgtgaagccagtcataagaagctctggaggcccagacttgtgactggtgggaaggtggtggcaattttgtgggactgagccctctgctgatatgtccaggtagatagtgtcaggatggaattggaggacacctagctgatgtacggtgcagaactgattggctgctgggtgtgtgggagaaacccccccgcatcacatttggtcacagaagtgtgtctgtgttgatgattgttattgtggagtgagagcagaggaaaaacacagtttgagtttttccaaacagggtggaatcccatctgccaatttagaatctgaaacttatagtttcagtacttcaattaagattgaagtacttcaattcagtacttcaattaagattcagtacttcaattaagattcagtacttcaattaagattacagaactggtaagtgaaagtgatacaacaaaaatgtaaccaaagtctgctcaacttaacagctaataacaacaaagttcataaaaataataccagtcgatattgatagcactgattgagccctggctctgtgcatgaccttgttaagggctttaatcgcattaatctctgaataaatatcctcacaaccaccctgagatccaggtgtttgtaacaattctacagatgaggaaactgaggcccaggaggttgagtgtcttgcccaaggtcaaatacctggtacctattgtaaccaggatgataactggatgagtctaatccctgagttcttacccacattgctccccaggctctgaaggaatctcatccttctcattccgtgtatcattttacaccccccctccctcctaggaaaatatacaaggaaaggagtgagaggggccgagggtcactcacattttacagtcagcttgagggggtcgctcctgttggagctgactgggttggagacctcacactgatactccccagcgtcctcctgcctgatggggtctatggtgagcatatggttaaaccaggacagcttcatcctcttcgtgacctgcagacgctggttgttgaaaatccactggaaagaggttccagtgttatttgtgtggcaggtcaggaccacggagcccttctctgtgactgtggtgctgctggcttggatggagggctgagccactgactctgtggatagagtgaccaacagaaagtgtcttggggccatgctgcatcctcagagatctcagagtcaaatttagaacattctcctgtgaataaaggagaaagatgaaggacagggaggagcagagagaaccagagacacccatagcagcgagcagtagggactacagtgacctcagagaccccagggaccaggaggacccagctgcctcagaccaggaccagggagccctgaaaaccctcccacagatgagcggccccagagtcacatgagatgcaatacctggggtggctttaggagcaggcagtcagagaaatggaacatgggtctcagcccctaagggacaaggaagaggtgtggccagctcctcctaggatcctacatccaggacccagtctgtaaagaggttatgattattcctttcttttttcattaattccctccctccttcatcagagaactactgagtgtgtgtctcagttgggccttgtgcaggtacagggtgtagtgggaagagaaagctgagtcctttccttcatcctcccatgggagtgacatcaacaaatcaagaaattcatgatttcacgtccagtgagggaagaaatgtggatctgatgggagaggcttggacaatcctggcattgagtctgatagttgagacaggtgatttcgttctaagtaaaaactgactaattctccatttgcccgtcattcctcagaccagaatctccctctctgagctgaggatgcccaagaagaaaggagctgaaccaacatctggtcctggggtccacagatgccccacggtggtggccacgaccagattctgggctgcagacacacggtggtgtgacgttgagcactgacagcctgtgtgatgctgatgcaatttctctttaataaaatggggtaaatgtcaatggtccctggcttgccatcctctctgtaaattaacattaaaatatttacaattacctgacctaaagcttggcacagaatagctccaaataaacatcatctattattattttactccaaaaaaaaaaaaaaaagagttctctgggcctgattcctggtggagaaggagcggtccagagtgtcttttctctgctttccctcctcctgaggacagtgcacttcccgggacatcttttaagtttcccatccagtttaatggcctgggaagtttgtttgtctgtcctctccactctgactctcaggtgaaagatgaggctctgcccttgcccagatggggctctgggggctgagccctgcctggtgaccagctctaggaaccacggccctgggacagctggtaaatcgttgctcacaatcagccctgcccaggaagccacaacccagccctggcacaggctccccagggtcatctggagtcaggatcttgggacaggggcctggggcaggggcttgaagggctgagcttctctcagaggatcctcaggccaggccctgactgagtcctataagatctttctcaggtcatgtctatgaggaggaggccaagcggggttggactgagactgattttcccccgctgcatctcccgcatcagactatccttcttgctgtagggaatttccacggagtccggataagggaaaggaattctgatctgttatagtttgtctcccctgggtgtgtcctgcactaaatgcccaaaccccaacatgggacgtaatgcagagggggatgcaggcacagcccaggcctgacaatcctgcgtatgtgaagcagaactgacccccaacacccagaggcacggaggaatcactcaccgtatacacggagatggtgagatgcctgttcaatctgagaatttctgtatgtgacttgtagggtgtagtatcccgtgtcctctagggtgacgttctggaaatgcagatctccactgggtgatattgtctctcgaccgctgtatgcaggccctggagtcctaacgtgagtgtctattacatatgctgcgattagctggttgggctccaccgttttccctttgtaccagccatagctgtaaagattctcgggcagataaaccacagagagatgaacattctccccttcagcaacttcaaagggcgctgatgcaataaagagccaggcagtggtgggtgcgttccagaaagttaaaagtgaggctaggaaagggagagaatatcagtcaatatttgacctatgcattggcatggaaagacggggtcctgggtgcaggtctcttcacccctcagccttagagggtgtgtgtgtgtgtgtgtgtcctactgggtcaaagtcagcagcatgaccctcattccttcagtacctctgaccttggcatttccttgtgtgaaccctctttcccaggggtctgcatggttccctccccactgccttcagttcctactcacacaagggaatccctgggagacttctttcgtgaagcctcctctagagaccctgggtcttccctttctgacctttcccagctctgttccctccagggctcttgtcagcacctgacctcacattctagatctctttgggtgtctgtcttcccccccatgagattgtgagctctgtgagggcatggacttgagtgatgttagttgcaccccagtgcctgggacaggctgcagactcctgtggatgagttcatgagcgttcccagggccttccatatcctggggtttatttgctaatgtctgaggttggcagatgaagacagagtttcatgccctggtggtgtttttatttaaattgtcactgtgatatagttttactatcattttcaaaatgtagtggccactgacaatgaacttgaaaacatggaccaactgagattgttttgccccttggcaattccagttcacttagattttttggttctccttagacgctctctcccctgagtctctaacaaaagccctctgtctcctctcagagccccatcctccccaggagaccccagccagtctctgtgctccctcctcccacccactcccagggagtcctcccctcacctgtgagcaagagcccctgccaggggatgcattctctgtggggacaagctgaggggggccccatggtctctgctgcctgctctgtcctcctctgtggagaggagcttgggctccaggaacgctctagacagggttactgtgactgttgtctctgctgtccttccttcctctatgctgagcttcctctcaggcaggagcacttcccgtttatgggcaagggcggggctctgcctacaatgtctctctgtcccctcccctctcagtcctgcctcccttgtccctcctttctccttcctttttgcctatatttggttccctaggcaaaactttgagaagcaacgctgatggggtcctcataacaggacgacccactctccccagtactgacctctgctgtgttctggccttggttctgtcacagccggtagattatttccctttgtgacacacaaaaccagctgggccctgggtctcctcatgctctccagtgctccaggaaggcagaatgatgcccagcaggaaagtgacagaggtggctctgggggctagaaaggggctcactgggtgatggctgggaaggacccacccgctatcttcagtgtcaccagcctggcctctgacccagggacagagacccaggcctggaggtctcgggaggatccccagctcctaggtgtggagggaggtgtcctgtgtgtcctgggaagagaggactttgatggaaggaggtgggaggctctgggttctgctgtccttggtgaaggtttcagggggaccctctccatgtctggggtctgtgcccccagcttaactctcattctctttgcaaatacatatattttgtggatctgcagttgcctgaactgtctcatgtccctaaatctttgtatccctttttacagaaggtcaggaagggtgtgtacatgagtatgaggactatctgatcagggcgagtgtttgtttcccaaagatctctttagatatggtataatacataagataaatgtactgaattagcaattttaagtgtagaattaaatgatactaattctattcacaatgttgtacaaccatcaccataattttttaccagaaaatcttcattataccaaatggaaacttcatacttttaatcaataactccccacttccccctgccccacccactggtagcctctgatactatcaatctctgtgaatttgcctagtttacatgtctcatataataaggaattatatacgtgtattatttttttctggattatttctcttagggtaacacttttaagattcatccacgtcgtagcatatattacagcttctttcctatttatggctgagtaatatcccaatatatgtttatacctcaattttaattcattcatctcttaatggacatgtgggtggtttccacatttttgctattgtgaaaaccgctgcaatgaacttacacttggaagtatctgtttgggtttctgtgttcatttctttgggggtacatataggagtataaatatggggtcatgtggtagttctatgtttaagtttttgagaaacagccaaactgttttccagtttgctgtgctattttatattcccatcagcaatatacgagggttccattttctctacattcttgtaaacacttactatttaatattttttaaaacttatagccattctagtaggtgtgaagtgatagctcattgcagttttgattttcatttccctggtggctgatgaagttgagcattttttcatgtatttactgacaattttaatattttttagagaactatttattcaaatcatttgctgtttaaaaaaaatgggttatctttttattattcagttgtaatagttctttatatattttagatacaagtcccttatggggtacatgatttgcaaaatttttctcatattctgtgtcttctcactttcttcatggtgttctttgaagcacaaacatttttaactttgatgaagttcacttatctatttttaattttgttacttatgctcttgatgtcatattgaagaaaccattgcccaatccaagatcattaagttttactcctatatgttcttctaatggtttgataagttttgctattccatttaggtttttgaaacattttgagttaacttttgtatgggctgtgaggtaggggtctaactacactatctcgcatgtggttatccagttgttccagcacaatatgaagaggctaccattctttccccattgaggaatcttggcacccatgtcaaaaaccaatgggctgtaatggtgagggtttatttctggactcttgattctattccattgatctctatgtgcattcttgtgccagaagcacactgttttaatgattgtagtgttttagtaagttttcaaattaggaagtgagtcctccaatttttttttccagattgttttggccattctggggtgacttttaaaaaagatgtagttcaatggttctcaaagcaggagtggttcagctctccttttttggcagtctggagacctttttaggaccttaatctaagtagataaattattcccactttcttttctgagttgctatgttacagtgtatattgacacccatgaaataattgagagaccctggaagtgcttgcctacatagtgagggacaattagttccatgatcatgggcacagaagattttgttttgggaaacaattttgttggtggagttatattcatgcttactcttttatttgtcttcatagcctgcatctccttcagacttcatatctgtttattttcttgtttgtcctctggggtttgggtgttgggtgaccagtcagctggagctggaggaggtgcttagcaaggcagtgaccctggttgggaggagcagggctcagcagggtgaaagtagctgggccttgagtcaggagtggcatctggaaggcctgactgtaagggtcagaagggccagcaggtgggtgtcctaggcacaaacggtggctgctgctgtggactggaggaaggtaagaggccccgagtattccatgttcttactggctccccaactgaggattcctctcctgggctggtgctgtcctgcagcagggaggggttagacagggacggctgcacatcaggccggagtccatgtcatcctcttaggcactgtcactacagattgaggattctgttcataagccaagcctttgcacaaggaagggacccgggctctcaaggaagagcagctcctggtcagacctccatctccttctctctcattgcctgaggcctcaagcttggtctacctggcacaggggtctggatcctcctcccagggttggggtcttactgagctgggcacctgcaggtgggagaagatctggaggggccccatctgccttcaccagattgatgttgagggtccctgagtcctgcaccactatcaggtgctgagcaacttccagtgtcagtgacaaccaccccatggtggaagcagaaccacctcgtgagaaagcacctccaagcctcagtgcttgccatgtgtgggaatttgctggtttcagttgggggcatgttggtgggtggtcatgaattcagggccggattctatgctcacagtgcacatgctggatgtggtacagaccccaggcagggctcagtggggtggttttgggtgtgcacaggtatcttttctggaggagctggtggtgatttggctcccagaagttcctgagctctgcagactcaccaagcactcaatatttgagtgaacattgggcgagagagcagaaggtaagtgtcagggcatcggggttggtgcctctgggaagaggaggaacattctgggaacaaagctctcccccggcttacagggagcttcccatcgctcctgccttgaggatcagggaaactagggcctctgctcttccaggggctgcttgcaggcagtttgctctgggagggggtgacccaggagttgcctctcattttgcatttgagatttaaaaggagaagggacagtatatcttgccaggtcacaaaaattacaggcatcatattgactgaagggcactcctgtcatcactgcaatataccagaatggtcttttaaaaaaataagtgatttaggtttaccagcaactgtaatgcttgttttattcttctagttcaccgttaatgtcacttttgtagttttagcactggcaatgttgattttatgttgactctgatgattttaagctttcatttgttcacatagagatcatcttctttctgaatattaatgcattttttctctatttctactggttattcctgtacatagagtagagaatcacttttcccaaggaggtggaaagcttctgactaccaaaaaaaaaaaaaagtgtcaaaatgctttaaagtcagtaacttaaagatcaaatccaagagtgggcaacagattctgcccagggtctgaaaggtggagaggtgactggtgaggatgtttaaaagacctctcctctctactccctaaatgggggccatccagtgttcttgaggttcagagaaggcccagggctggggcagcagggcactgtcagctcccagctcccaggggccaggagtaagaccccaacactgtccagacactgattgcattcattttgggggagagtagattcttatttaaagaataatacaaaagtctacaaatatgaacataaacagaaattcctttgctacaattttccccttaataagacattccttcctaatgacatatgtgactgcattcatggctgagatgttttctaggatggtgagagcatcagagtggactatctggtgccttggggtcatgcattttcttcttccaatgtctacaggatcccccatgtcccactttgtagtgtaactcagtgtgtgtcattctggtttttgttgtatagatccttggaaagcccatgtcattcctgctgtgaggtacaggcagccaaatggcatcatctctaaacatgccttctcctggtacatcaaattatggaataaatgaaagccattttgacagatattgaagatataagtttctactcttcccacacatgcttctcccaagtgaaggattttactggtgaattgttattagagattagtgtggatcagtgactctgccaggggaaattttgccctctaggggacatttggcaaagtctggaaacattgttggttgtcagagctgggggagggagtcctgctggcattgagtgggtggatggtgctgaacaccctgcagttcacagagccccaccagtttgaccacccaaatgtcaatgctgaggagtggagagccctgctgtgccctcccgcagcttccctgaagcttcccctcacctgctcctcccatgtctccccaccacttccccacttcacccgcctccttacacctcagtcccctccacctgaactcaccccttagtccaaggccagccctgatctccgctctcctggtctccttgctccttagcaggaggcgcccactagatggcgcccttgcccttactggagctcaccgtctccctttccaccctgagacaaatgtggctgcttttactgccacaaccccagccctccacactctagatttgctcagggagcagctcctggacagacctcagggaccccagggaggagcctcactctggagattttgatggcatggtctttgaacttcactgttacccccagtcaggatccaggatgttgggagtgcatgattctgcccggtcccacttcagcaggaccccactgctgagttgtctgtggggacccgggcctctcatctccttcttgcattgcaggagagggatcttagcactgctttcacataaagtcagataatggaggagtgcaggtgagtttgggaaggtggacatgaagagaggttgtgtccctagaggtggcagcagtgagaggatgggcaggtgggaggaacacagcccatccagggttgccagccatattaggagcgacagcctttcctctaagcctccagcctttttcctgaaacattccagaactttccacttcagcacttcccactgaggctcctcaggtctgtccctgagctcccagctgagcctacctacccatctgaaatcctgagtcctgtgtcaccctcgttccccattattctgtgcagttctgtgggacgcccagctctcctgacacccccagtcttcagaatggccatcagcgctgtcgctgtggcaccagggtgactgccgcctggaggctgagtcctggcttcctgacagctgtggggcccgctctaggctcccttgtcctgatcattcatcacctccaggatgcacagcagctgggccagggggaggagcagggacaggtgtcagccaccctgtgtgtctgcaagtcaggctgggggtgtgggaggacgccaggaatgactgaactttctgatttagagggtgagagcttgcactgatggaatttgggatttaataggaaaagcatagcgttttcctattttgtaggcagggtggctggagtttggaatcatagattcccctgggatgtcactgtggacctcagtcccacccgttaggggcacagatttcagaatccacaccctggggcaaagcaggcatgggaggctccatcagcctggccagggctctctatttgtgcagctgctgcaaggagatgtgcactctgatgggaacagtgctccctcctccttggggggcagtatctagctccctgcagcccctctccctgcaggccctgccctctctgaacctcaccttccccaacccgccccccgcaatcccatctcagctgtaatcccaacactttctcatccattatgggtggactgcttgagcccaggggttcaagactatgctggctggacaatatagcgagttgttgtctctacaaaaagacaaaaattagctgtgcatggtggcatacacctgtagtcccagtcactcaggaggctgaggtgggaggattgcttgagctggggaggctgagttggcagtgagttgagattgtgccactgtatacttcagtgtaggtaacagagcgagaccctgtctcaaaaaataaaagtaaaaaaaaaaaaagaaatatggaatacattattgttaactctaatcaaccatgctatgcaatagtccaccagtaataccagtaatagccaataatgaattatctgaaaaagaatacaatttattcttagctatctactgctaaaatttttaagctatcttttatgatagctgaaacaaaagaagtaaatttaaccaaggaagtaaaagacctttataatgaaaactgtaaaacattgatgaaataaattgaaaaagacacacgcacaaatagaagatattccatgttcatgaattggaagaactgatattgctaaaatgtccttaccacccaaagtggtctacagattcaatgcaatttctgtcaaaacaccaatgatattcttcgaagaagtagaagatcctaaaattagaaaccacaaaaattcctaaaacctgcacaaaacaccctgagttgccaaagcaatcttaaacaaatagaacaaagctagtggcattacacttcctgacaatcaaagcatactgcaaagctatagtaaccaaatcagcatggtcctggcataaaaacaagcacatagatcaatgaaacagaataaaaatcccagaaataaacccatgcatctctagctaactgattttcagccaaggagccacatgcacacaatggggaaaggacagcctcttcaataagtggtgctggggaattggatattcatatgcagaagaatgaacctagaccctatccctcaccatgcacaaaaaattaactcaaaatgtattaaataaagacttaaatgtaagaactgaaactatgaaactactagaagaaaatatagggggaaaatccatgacattggtctaggcaaagagtttttggataaaatctcaacagcataagcaacaaaaccaaatataaacaaacgggatttcatcaaactaaaaagcttttatacagcaaagaaaaaaaaggccagcagagcaaagagacaacctacaaatgggaggagaatatatttgtaaatatatacatatatatttgtaaatatatacatctgataagaagataatatccaaaatatataagaaaattatgtttctgtatagttttatctgactgggatacagaggccacatccacagtcccatcctcaaaggccacttgttcccaaaatgtcaagcacatccctcaatgatccatcatcaacacctatgtctgtaggatgaagggtgaatcatgaagcactaaaaaggaagaaggaagccaatcccaaaacaaaatgatgcagggtctggaaagtccaaagcattttttttttttttttactgcatcttcctcctttcttctccacattcccaatcctcactattgattaacaaaacaaaaaaaactgggacccaccatcttccctactgtcaggagatctagcgagattgtttgagtcttagaccaaactttgccataagccaaatttctggctgactttacaatgatatgagctagcacagtctctttttctgccagtcaacttgtgctcggttttatttgcaaccaaatagaggtggtaaccaaatataggtgaccctaaaattagtcatcaggatgaaatcctaaaatgtgcaacaaactgggttgaattcaggattagtagcaacatctctgttgtgggcttgaaaagggggcacccttttatgcagtagcaaaattgctaaattgttgtttgctgagtctttggactctcatcccggattttctatgaccattcaaacagggctgcaatgaacatctatggttgtttagcttggcacacttctacatttctatatagtaatatctagaagtgcatttgctcaatcacaagatatgcacattttataattgactgctatcgaactaccttaaatagccttaatttgttctcaacattgtttaacagggtctgtttaatgtcctacgtccagcaaggacagtatcacttttcttaatatttttcaaattattggaccttaacaaatacttaatgtgcaattaattgattcctttgtattcccatgccttcttttatatgtttccttatagtacacaaaaccacattattgtttctttacttgtgtcattccaccctggaccattcctatctaaactataacattatgagagagagagagagagaaaacaatatgaaaatataaattgattaatcaaaaaaatttaaataggacaaatcaggaagacacaagagagattttaaaattattcagagaataccacaatagctgtaccaatatattttaaaacttagatgaaacggacaactatctcgataaatgtaaattaccaaaactgactcatgaaaaaatggatattatgaatagagcaataatcagtaaagcaattaaaaagacagttgataatttttatttactgacaacaataacaaaatttcaggtcctgatatttttatggtgaattttaacaaattttcaagctcctcctcaaccaattctcagaaggtttaaaactttaacaagaaaacactttctaacacattttcagaagctgttatagcatgataccaaaaccacacaagaaaattatagaccaatctcacttacaaatatacatgcaaaatcaaacaaaatcttagtgaaccaaattcagaattaataatagcaaacaagcaaaatatgttatcatacgtatggcttatatcaggaatgcaagtatgtttcaacatcagaaaatacttctccacattaacagactaaaggagaaaaacgcttgtttaattatctcaataggtttttagagaattttgaaaattttataaagttatgcgtattctgtaaaattgatgaaatccaaccttgatttatttttaaaaattgcctttcctatagaattataggtaaaggaaacacatgcatcctcacagagctacttcaaggctaagttacttcccataagtaacgtatcctgtaatgtgtgcttggcacatattcaatactaaacaaatatttgcaaatcctcaaaccacttctcgctcaaataacccacctttgtcttttgcctttatgttagggttgattttctcaattgtatcttggagatcctttggtgggtctttcagcaattaccctgaatttgcttttctgtttacaattttaattcctgggaactctttcttgttctctgactgcacccttttcatgagagttcagccatcaatcctccagaaccccaccccccccgcccccccaaaaagcaataaagatgtctaaaagcttccttctgggctttcgaatgatgtttaccccaggcatttgttctattcgttcatcacccattttccctacaacttgcctacacttgatatcagatttttatttattagtcacctatcttcttcattggcccattttcctattttgccactggttgttctcaaatgtgttatgattcctggttgtacagtcaagtggttgataatcttggatatacgataaagatttgctctgtagctgtgtgtaagcctatataaaagcttttgtatttttcttcttaaaaaagacaaaagatggttgggaagatccctccagttcaccagttcgaggctgcagtgagctatgatagcgccgctgctctagcctgtctgtctgtgaaaaacaaggggggcggggggcgggggggaagactggagatgtaaatctcccgcagggccctacccgtatccgcaacaggtctctaacaggaacagcctcaggcctgtgttggaacaaggtaggttacagaaatctggaagccagatctgtaacttcagggtaaggactggctctcagggctgatcccccgggctgggtgtcccagaggcacccgcccccgccccttccccaaggcaggccaggacaccttcactcctctccttaggctccccacccccttctcctccccactgtgcctcctggagtagcggtggcggtgccacaggggagcggggcggggcgggctctgagggcaagggggatgggccccgccggggtcactggcggccaccctggaaactcgacgcaggccggcccttctagtgaatcgtcccagccacagctggcctcccagccgcgcttggggcgcctcggggcgcgaatggtgcaggttggggagactcaccacgcaccgtcgggggtcggtccggttattcctcaccgctcggctccagtgggcgcgcgggcctctcctcctcagttcctgcgctgcagtccctccctcacccttcgcagcttgggaatccaactgtgtcattccgacggagcgccgtgaggacctccgagggtgttagcgccaagtgatctctgtccagcgctctgaatatccaagtaaaggagttcaatgaagggcgggtcaacggaggagaaaccgtgactctctcaagggagcccaaggcctccttgtctaattagtgacgcgccaatggatggaggctcttcccaccatctcttcccagcatccagtgacaccaccgccaagggacgggctcggcggaacctgcaggaaagaagcatcggctgagcctgactgcagcgctgtgaagagacaggggaggggatcagtagttggtcccgcgcccaccccctgtttccgcgaggggcggagttgactggccatgcaggcagagggcgaaatgtgaaattccactactcctaccgtttttccctgacccgatggggcggagtgtcgtcaggctaagttccctggcggtaaggtggggagattgaggcgcacacctgccgaacggtaacgcaggattagctaaggcgagctcaggacagaagcctcccgaggagcaggagggcaaaataataaataaataaataaataataaataactcactccttggtctttatttgcggcaggaattcagaaggtgaaagcggggccttaggatctttctgaccttttgggttttaagcaggaggtgtcagaaatgttaccacagggctagctggcttgtggccagcaagcgttcacaatgccctcgatttttcatccctctctgtgggttctttttttcattgtaaggcagaatttctacgattgctcacccactcagagaacctgagctggtttagaccaggtgagacaggctaggtttaccctggtgatgatgtgttgttgccatggcgatcctgcccagtaccagaggccctgcagattcagatgcttggtgcctgtgcttggctgaggggccaatgggtgaagctgccatctgcgggatgatgactgaagcctctaagtcagaatccgcccaggctgagccttagggcagctccatggagcctcggctggcctgggatagagagtccaccactgtgccagcccccagccactgcctaggtcctgtgctgagagccccttgtccagggaaatggcgtccagtggaaaagggaccacccccttgcccttcactcaaggcaggttggtgacaaccctgaagctaatccgttcctagaggagctgcttctgggtccgagttttctctgcagcagagcagctccctggatgggatctgttcaaagtccgcctttcacgcggaattttccgtccttgcaattttccacctccaccactaggggatcctctctgaccgcctcatgccggctctggcctctgagcaggggtttctcttctgcatgtgcgaccttgcgcatgcctagtggccttttgggacctagagctgctccacaccccgatggggttacagagtgcctcgcctccactccaccccaccagggttccttccctggctgggatgggatttcagaagcgccgaggaacagcccagacaggtgtgggagagtagccaaggcccctgtcccggggtggccaggacagcggtggcctcgcataggacctggctgggctgctgcaatcagtgtcctgccccttggagagcaacagtgaaaacaacaagactatcttcacccaccttaagaaagaacagaaccagtatccccaactctgctgtgtatcccaacccaattccattccccaccccactctcagtagccaatatgcaaaatattagaatactcttactgttattattttcaaccacactctgcatcctgaaaaaccatatatttcgttatgtgcttttaaacttcttgaaaatgaaatactgaggctgggcgcagtggctgacacctgtaatcccagcacttcgggaggcggaggcaggcggatcacgaggtcaggagatcgagaccatcctggctaacacagtgaaaccccatctctactaaaaatacaaaaaattagccgggcgtggtggcgggcgcctgtagtcccagctacttgggaggctgaggcaggagaacggcgtgaacccgggaggtggagcttgcactgagccgagatcgcgccactgcactccagcctgggcgacagcgccagactctgtctccaaaaaaaaaaagaaaaaagaaatactgaattttcaaatacttgctttttttttcggtcaaaattatgttctcaaatttcactcctgtagatgtgcgtggctggctgtagtttttgcatttttattattaggtattctcctgttgcattaatatgccacattttatttctctcatgtttttggtgaccacttggggtgttttttggttttgtatttttgctgtatacatgctgccatggtggacatacctctttatacatatttcctgttgtatgcagacacaattttaggatgtgacatcttcagcttttctattgtgtcgtgtgtcttttccttcgtgctttgtgttatttacatattctggacacagattctttgtcaactgtatgtgctgcacatctctttcccagtttgtgtcttcttcttcttttttttttcttaaaaaaaactttctttatagtgttttttttttctttctttctttgttttgttttgtttttttgagatggagtcttgctctgtcacctaggctgaagtgcactggccgatctcggctcactgcaacctccgtctcctgggttcaagtgattctcctgcctcagcttcccaagtagctgggattacaggtgcctgtcaccacacccagctaatttttgtatttttagtacagatggggtttcaccatgtttgtcaggctggtctcgaactcctgacctcaggtgatccaccctctttggcctcccaaagtgttgggattacaggcgtgagccacagcacctggcctgtgttctttcttaagtagatgttacttttaatataatagaatgtatcatattttgcttttatattagtactttttctatctaattcaaacacatccccaagggtctttgtgtgtagactgaccaatttctcaagaatcatgaatgaatactgcttctctttccccaatttatctgtaatgctacctttattataaagtttctatgcatgtgtagaaatagttcctgatttttcactctgtgccaccagcataccaatagcacgctgtcttaaatattaaatagcagagctttatgagacaacttgatgtgcagtaggcaattgcccccttgttactcttcttcagggttctttgttgtaccacatgaattttagaattggcttgtccagctaaaagacaactgcaaggattttatttggaagttcataattctatacataatttggggaaagtattttcataataccaagtcttcctattaatgaacacagactctctctctctctcccccacccccacctgtttagttatttatatctttatggtctgttagttattgtttattgtctttcaaccaggtttcatgtttttctacatagaggccttgcatgtgaaagtctttcttcctagcttgctattacaaattttttttaattgcactttttgggtacagtggcttgtactgtaatccccgatacctgggaggctgaggcagatggattgcttgagtccagaagttcaagaccagcctgggcaacataatgaggtccctgtctcaaaaagtttgttttaaaaattgcatttgctgttattcaacaaatgtcattgtgtctcatatatggatttttatatctgataaccttgttcaacaatcttttgattctaacaatatatcagattcttttgagttttccatatagacaataatgtcatctgtaaattataattgtttcttctttgttatttcttggaccttttattttatatttttgtcttgctgcaaggcaatatccctctatatattgtggggtcttttttctcataaagtggggatggtgaacacccttgtcttgctctctgattgtataaagcatgctttctgtagcattttgtagacgctcttttttagattgaggtaattcacttttatttctggtttactgagtttttagcataaattcaggctgaatttgagctaaagctttttctggagacatcatttgaaaaattcatatgatttactttctttaagtcaccaaagttatgatttacattgaactgagtttctactgtttaactgtattcttgggagaaaacccacttgtcactgaacaatatctgttttatttactgctgtcttgtgtctaaattttcttttaggattttttgtatatgctcagattagcctgttattctcctttctgtatttttttctggtttgggggtcaaagttataatagcctcacaataagagctaagaaaccagccctaatggaggccggggcaggaggtttggagttcaagaccagtctgggcaaaatagtgagacccccatctctatgaaaaatagaaattagccaggcatggcagtgagtacctgtagtcctaggtacttgggagggtgaggcaggaggattgcttgagcctaggaatttgaggctgcagcgaactatgattgtgccactgtactccagcctggatgacagagcgagaccctgtctcaaaagaaaaaaaaagaagaaataaaaaggaaaagataaaagagctaagcatctgtttccttttttccattttctgggagagtatgtgtaagactgtaattaactgtttcttgaataatgggagaactctgtaaaataatctggctttggtgttacctgtattggaaggatgaaaaataccaattcagtttcattattggttgatagggctactcatgctttttgttttgttttgttttgttttgtttttgagaggaagtctctctgtattgccctgttgtccaggctgagatgcaacgttgttcacaggcctgatcctggctcactacagcttctaacttccgatctcaatagatcctcccgcctcagccttcccagtagctaggactacaagcatgcagcatcacatccagcctcttttcctgcctgacccagttctggtttcctttagttttctaggtgttcatccattttatctaatgtttaatgcatttggcataagggtgctcagtgtcctttcattgtctgttgtctgtaactgttgccattttcattcctatttatgagtactggcgtcttctctcactttttcttaataatcctgctggaactttgctttttaaagaacatcttttgacttgttgattcttttttcatacatattaactattttcttattttttgcctttatatttatttcttttcctgtttgaaacattgctcttttcttactataaaaatgggtaagtagctcatgaattaccacctcttttaaaaatcttttctactgtaagcattttagcagtttacatttgcccacaagtaccacttcagctacaccctatgtgcttttacataaagtcttcatttttggtaagacatattctcaaattttaattatcacttgtttttaaatccatgatgttttatttgaaatgttgtttctaaagatacattttctggttatacttttattcttctaatttagcacagtggccacaaaacatggtctgtgcagtgcatacaatcgatgagtaatttctgagctgtagtatttggcataatatatggcaaaatttcctaagttttccatgtgtgctttaaaaaacttccagtaaaatacataaatctgttagatcaagcttctcacattgttcaaatagtctatatgtttactgattcatttgactgcttgatttatcaattacaggtaggaatgtattcaaatctcctattaaagtgtgacactcaagtggctttttaaagacagagatgccaaaccaatgaatacatgattttccccaaagcctgcacaaattctctaatgaaattttaccatgaaagtttgtttaattaaggcttactaaagcagtatgttgtcttttactttttaaacagagaatatatattttaatacatcgtttaagtttatgattaattatctattactgaggataagaatctttgcctgtgctcattcagcatttgcacttcatttatgatctgccttctcatagcttctgttaatttttatactagagacatttatttgtttgtataaatgttgaaggtttttttttgttgttgttgtttttgagtcagagcctcgctctgtcacccaggctggagtgcagtggcatgatctcggctcactgcagcctccatctcctgggttaaagtgattctcctgcctcagcctccagagtagctgggactacaggcatgtgccaccaagcaaggctaatattttgtatttttagtagagatggggtttcgtcctgttagccagggtggtctcgatctcctgacctcatgatctacctgcctcggcctcccaaagtgctaggattacaggtgtgagccaccgtgcccagctgggttttttatattataaggagatgtaatagatagatagatgtttcaaagatagtcaaatgtttttaaaatttaaaacacttttttacaggttgactttcaccatttaatttcatctatgtgttttgccttagagaaattttaaatgctatgtagatctcatgacttataattatgaagcattttgttttctgttttccacgaaacttagcttaactttgagcatataatagttgtaaaggtaggagagtaacactgaaaaaaggaattgcataaaaatggcacattttctgtagagttgtttatcgcctgaaaataggccccatttcatggaagtaagatgatcaggctcaggtccccagacgaaactcttggcatggtttttggagatagtccagggctcagtactggctctatcatttgctacttctcccaaagtaaccaatatctcatccaccctgagcccatttccatatctctaacatgaggataatagcatctaccttacacaccaagtagagggatcaaatgtaggaactaaatcaaagtaccagcactgaataacctacatcctcccacttcccaaaaggaagagagatgtatcccctgttgacaaacgagaccattttgcaggagagaaaggaaatgccagttcacttgcaatgtaaacatgctctctctttttagggatgtccagggacctgagagagaacccatgcttaccaaagagtttctagttccagacacacaggactcgaagggtgacaagtatggttttcagggtccctgaatccacccagtcctcacagaaactcctaaaagctgtcgattgacagcgttgagttcacagctctggtcctcacatgctgatactgcttgtgatatcgaacccgacaggaccccacatcacaattgatttaccaactacaatataatacctcctgaatctccaaattggctcacccaggaacaaaggcttggggtaaaactggattaggagatataagctctgaattttctgagggtgagacacacaaggattctaagtgacacgccacagagtaacgggtctgtgactggaggacccacagatttgtcttactggagacaccacatgcacacaaactccatccttagctgtggaaacaagggtcttttgctatcttagccgaattctgggagtaatttttggaggggaggagatctttgggattgcctctttcaggccctttacaaaaatacctacttcttaaatggtaaagcttacactaaactgaaaaaattacatccttggctttttatgaagtaggtgttggattgaatcactactggaagaagtatggcatcgcaaattctaagcagtggtcaaaggatggatctgttaaattagaaaaatctctaaatttataaaaagattttagattcctttattctaaacaattgacctatttgtactcatgggacaatcaaatttcaaaggagatatgtaacgatttcatggcttgcattaaaaatccttctgataaaattaaagataaaaaatctgaccccctgccaaaaaaatcttttgaagttcatactgcctgctttcaatattctgtgggattcacaatgaaaggtgccttatattgtggcctagcttcaagtttatgccttcgccaccatggcctgggttcaattcccagtcagggccccagcgcctttggtttaatgtttgcgtggcatttgacttttttacctatttagtattggtgagattacctttggtaaaaaaaagtttaaagagtggaaatcgcaattctttgtgttggctaaaatctgattataagagatctggaaggttttatttttctttttcaaagagctctatggtcagaagtcggcttcatgaaaagctaatatttaattatatgtacatacagtctttctggattttctcttttgcctcctgttttgaaaaatatttggatttgagtgaaactccgttttagaaattaattgcttggtacaatatacccatgtaactaccctgcacatgtaccccctgaatctataataagagttgaaattttgacaaaataaaattagattttgaattaaaacaaataggtgcttggttcctctgctcacttctttttaaaaggaattcctctcccatgtacttcttcttttcccttctttaccttccttttggcatctttggtatcacatgaagggatctagagggaattttaagtgactctgaaattccttgagaaatacacaaaaagatcccactcaccccttttgggggtctcctgttctccttgtggagtccagagtcagggacaggctcctccaggtctgcagctctgctctcttttatttcatcttggctgattgctttggttttgtgagtaccaggcattactttgtactgtgagagacacgtcctttgtgagtgcaacggctgctgggtcactggtgagggctgcagtttggagatggctgagagccgttgcaataaatggttgtgattgcagggggctccttgtttctttgcaagtttagatgagaaaggtgcagtttggacacagtttaaaggctgtgaaaacaccaccaatgaatatgatttcctttggggatggtctgattaaaagtgggctgattgttgctgtgctactagccttgaagacatgtttctacagcattgtgcagtgtggaaaaattgtgtggcttggtcttgtggcatgtcccttcttttagagacctcagattcaatgtgaaattcgggatttttgattttcaaagatctagatgccctgccttccagatgtgcctactcttcacatattttaaaattagatcctataaactgcaaatactttgttggcttctgtgagatcagaggtccagttagaaaaggaagacagtttgttaaaattaaaaactatttatctaatctaactagattggcctccaaatatgactttctgacattcagctggttactctgaaaagatttctaaatctcttgaggctcatctatatgtttccttgcaaagaaaaaaaaaaaaaaaaaaaagcaagcccaagcactagtaagaaaaagatttgcaatgtttcatgaaaggagtagatgagtgaagcatttatttgtagatactgggttggatacctgtgcaaagaagaagaggtcaataataaaaattgccaggggatttcttggaacttaacaagctgaattaaatatagaaatgtcaggaaatcaaggcaggaaatactcacttgtggttaggcagacagggcagggttctgagcttgagatggagcaaacagttgtggtgggtgaagttcacatgctttagagctcagctgtcctagtaaagaagcctaagagtctctaaagctcttatgagaagatggattttttttgcctagattaaaaggttaaagaattgctttaagttggataaaataaagctaaatgtttaagcaagttgtgaaaggtttatgaaaaaattaattaaaatatttttgtgtgtaaacatattgactaaagttgaaggggtataattcagcatttctgtaaattgagcattgaaataaaaacacaatgggtttctcttagagcactaacctgctctttaacaaaaattgtaaagggttatagaaagtctataaaaatgttaccttatggtcaaacattaaaattgggtaaatatgtctatcaggttttattaagaattaggtttaacattaatagtacactaatgtaaaggtgaaatttggcttatttggtacaaaaatcatacaggaagcattgtgaaatataaaatgatttttagctttctttgggctatatttctataaatatgttattgatgagggttccaaagttatgggagactcctataattctgctatatctcagtgtacattatcagtcataattataattgtcatgttaaattattgtgggccacagaggtaacagatttccttgtcaattgtgtctttgactatgactaccctaaaacgttcagtcacccatatacacatgttaccttgttttggccctctttagaaggtaattttataatcagctataaagccctaacaggtgctcttaaatgcaaattttgataactttggagattgtgacatcagaagagaggaaaaatgttcgggacacttggagagctaaaatgttcattgatatcaagcaggacaggaattaactgcatgaagtgaactaataggaggctgaagtgatctttttgactttttgcttaaaacgttgctgatcctttgttttgcttttcagagtcaaggcaaattttcttttgagctattgacagcttttaacgattaatcaaaatatactcctatgaacaccatttggagcattatttgtttctctctacccgatttccccagaatttggaaactatttgtgggtattcttaatttatggcaatatagttatttgcataagtgcaataagaatgtgttttctttggtaacaggacacaatttgaaaaactggttattttaccaaggttttgaccagaatgctgtgctttcctttaaggaatcaaacttgacttgtggagctaataaagcctttggaaaactgaccttatatcctgtgaacacagtccctgtacagggttactgatctgtgggaagaaaagaatgtcacattctgacaggtcaggaatcccaagttatcttgaaacttcaagaggacaggaattcacccaaccatatgtatttgatggtagaaatccatggcaggggctcagctttaaaaagtcttatctcagattccttctataaaacaaagtcccattaaaaccaattttaaaagcctatgtgaaaaataattattcttgctgcacctcgtacaaataaagtggcaaagcataataaagcaaattggtcctgtcgtaatttgtctttagtaaaaacgggaaactggggtcgggtgcagtggctcactcctgtaatcccagcactttgggaggctgaggtgggcagatcatctgaggtcaggagttcaagaccagcctggccaacatggtgaaaccccatctctacaaaaatacaaaaatgagccgggcatgatggcgggtgcctgtaatcccagctactcaaggggctgaggcagggaagcggaggttacagtgagtcaagatcgtgccacttcacgacagcctgggtgacagagcaagactccatctcaacaacaacaacaaaaaagggtaactggagagagggaagttatgtttcaaaaacttttggaaactatagtacacctgtttttaaattctagtctggcattcagtttttattattttctacagtttgggttaaattcgtatttctctggctacaagtctcctaaataatcttttcatttgtttcctttttctttccctttttccccatttttcttaattggaaatcactgaaacctaagctgtgctttcttaaagccctgtgaactgaagactagacaaccgaaacttctgaaggaagtagcagcaacctatttatatgtgttgctgttgcctactattatgttttagcaggtgctgcctctacacccccgaaacagagagtgctactgggaacaaatcgactttttccactccagtgctgcattcggtgccccataacgatgaccccctctcagcaggaagtagccagaaagattacaatgctccatctccctatgattcttgtgataaataaatatacaagcatgatagaaatcatgcgcaaattgacagtggggattgtggcaggccagatttcactaatggaggtccccatcacaactacttcagtactgactgagtggttaagttcagtatcaaaagctgaaagtgccagcgcctttctacaaaggctagaatgtaacaaaagcccaccaagggttttacctaggcctttcctgggccttacagcatgacaaaacaaagaaggaattcttaaccagacctgtttaggattaaacaaatttaattgggggtctgaagaaactcgccaggcctccacaaacaagttcattgggggtctaaaggaaccccccccaaacctctgtgattgagcaggagacaaggtcagggtaattgccccagcacctggactcatttagatttaagtaaatgtactgaggctccagagaaaggtctccaagacttagactagagttacagattaaaagaagttaatcacttatatctttagataaatgcacactgacacgtagacatacatcttagaaaatatataagctctggaaaaccttgtaatttacagttggtctggagatattttctgggccttctctctgtaaccggttccagaaataaaaaactctcttcctccccagtttatctgcatctcgttattgggccgtgagaaatagcagccagaccctgagtttggtctgggaacacactggctgggcttcctgcctggcggtagagcttcactgtcctccttcccagccaaaatgtggcccttgaaggcttcctccccaactgaccggttttgggttctaggtactcagggaacaccgtcttcaaggaggccattttcatactgttcctggtttgatttttctgaaattaggaaatgccccttgaggcatccaggattgtctttatttcccctgaagcttcccctcctgaagaaaaaagttctcaaacaccctcaggactcaaaccccaagttcaccctgtgaaacattcccatttcctaaacccaggcaggctcatggccctcagcctctcagaccccatggaaacctcctcccccacttcacgggttctctccatattgagagcctcccctcctcggcacacaacccagagactcaccccaacatgtgtagcaaatcaccctggaaacaatcatggctgaacgtggtagcccatgcctgtaatcccagcactttgggaggcccaggaggtggatcacctgaggtcgggagttcgagaccagcgaggccaacatggtgaaacctcgactctactaaaaatacaaagttcactgggcattgtggtgtgtacctgtaatctcaactactcaggaggctgaggcaggagaatcacttaaacctgggagacagagattgcagagagccaagatcgcaccattacactccagcctgggcaagaagagtgaaactacatctaaaaaaaaaaaaaaaaaaaggaaaaggaaaagaaaaaaaaaatcatgaggcaacattgcatttaacaatattttatttatcaaaagacacttgtctttctcaggtaagtgaaggtctagagatgaaacgagtcccgatgtaaattgccccatgggcattgctgagatcacaagatcatcactgcagcatgcagcacaatagtaaatttctcaggatggaagttcaacaatccaaaaggtagtattttttttcatgatgctcagtccatcatacgaaataaaaataaattccttttcatgatcatccattcagtagaaaaaatgatagtaaatttgttctcatgaagatttttaccgtaacatataggatttatcgttattattattattctttgttttttgtttttttgaagcggagtctcactctgttacccagtctggagtgcagtcgtgcgatctgggcacactattaacctccacctccagggttcaagcatttctcctgcctcagcttcccgagtagctgggattacaggcatgcgccaccacacccggctaattttcgtatttttactagagatggggtttcaccgcattggtcgagctggatttgagctccggacctcgggtcatccgcccatctcagcctcccaaagtgctgggattacaggcgtgagccaccgcgcccggcctcaatttatcattattcacgcatccacaaactgggttcttatattttgtacgtgattttttccattgaggagagatatctgtgcatattcatgctgctcatatttcatccacaaactcggttcatatttcatccacaaacataattttttccgttgagaagagatacttgtacatatttatgctgttcaaattcacatttcatcattcttttacaagaaatagataatgtattttaaggttttccagtggtattacagatattttactgggtgtatagatagaaattaaaccaaacttctttgttctggccgccagtcatgcatcctgttttcaacatagttcacatacaactggttgtgtaaaaatgaaattattttgtttagtacaatcatcaacagttggttgattagatttttaattatcaagttaatcattgtcattatgcttctcatcgcactcgtcattaattgctgtgggaggaaatttgttatgttccctatgagagggtgtatcacaaattcaaataagaattcaacgacaatggactgtataaaggaaataagcaagtccatggaaaacatatttttttccggaaaggattaaaatatttttaaaaaggaattaaaaaaaaattgggcacggtggcaaatgcctagagtcccagctgctcaggagatggagacagaaggattgcttgagcccaggaataagttggaggctgtagtgaacagtgattccaccactgtactccagccagggcaatagagggaaaccctctttctaaaaagacaaaaagaaacaaaacaaaacaaaaaaacaccacatcaaaaaacccaacaacaaaatgaaaaaccaaataacagcaatacaattggagctattcgatccaaagaagtaaatgaaacataaagcaaataaaagagaaaagctaatacctgtgtcctgcaggactcagtccaagttctgctctgactccctcctggtgagccaccccttaaaaagtcacttggggcggggttactttgacagacagtcttctgtcaaagagggaggcggtaaatagcacttttttttttttaatttaacgcctttccaacaaattagcggctatgttgtctaagagtgcaaatgtcagaggtgggtacaggcagcaagaccctccccacaggggcagcagaaggaggaatgactaagggaacaagactttagtgtgctcaactacacaggacaggaaacagatgctttttacaaaagctggtggacttgaaggcagaatattttcaagttcctgtaactgcgaactatgacctgtagcctgtgagagtgactttctgtggcaaaggagcttttgtgaatgtgaggaagttaattatcttaacagtgggaggttctcccggcttatctagctagaccctcgtgaaatcccaagtgtccttaggaaggggaagcagagagagatttgagtccagaagaggaagaaggtgatgtgaggcccagtaggggaacaaagggcgatggcatgtaaacacttagcccccagaagtgggagagggctggggttcatcacaccagaatccctaacaatcagccttattttaattacccttgaaatggaaggaggccttagagagccagaggcttggaggggcaccctctgctgcatacacagatcccaactgctgtgggctccaaataattgcaccagggaaatcacaaattatcaaaaataaaggatgtaaagcttttaaaaaatattaaaagcccaacaaataaaaaaagttctaaatctataaaattgacctcagtctgtatatttagatgagtcatgtgtatatagcgtttcacttcaaaatatatgataaatctctcattcattggcttaaaaataaacacttcaatcaagtctttatcagaaaaattgaaacgttaactcaattgccttttagttcatgtgactttacaaaacttaaaacaataaagtcagttttaaaaattattagtaaagtaaaagaaaaatatcttcacaatgtagacattttgtccacatgagacatgtgaaatattgccattactaaatatttgcaggtcaaaaactgtttccaaaacattttaaataatcatctggcctgtctgttttagagcattcaattctagctgaggtctggggacatgtgaaaggagccacggcccgactccgtgctgggaagagtcagacattttccacagctctgtcctttgctgtgggctctgcaactcctaccaattaaaattgcttacgtttttgttttatttttactaaagaggggttcctaaaagctaacattatactgagtatatgtaactaaaactactaagaaaacaatttcacaattatacaaatgtgccaagtaaatgaaaaaataaactgtattttaataaaggttataaaaagaaaaacatatagtggtgtgaggactgtctcaggtcttcactgagcaagggatcatgacattctatggcggacagctgaccttggctttctgctcctcttgattatgtctactaagtgacatacttactctttttccacctgtcttgcctctaagggtaacaggttttatgagatccctcctagtgctttgcaggtcagcctccctttgctgcattccaattttactgcctataccctccagctggcttttgatgacaaaagtcctggtcccagccattctcagattctgtcatccccgtgggcactatggagctcagcactatgggaggttccccaaaaatctcgttttctatgaggaatggccaccacctgcatctcagtgatgctagtgacccctttcctactcctgtgctcactggtcctcatgaagatcctggttggtctgtagccccctatttttcctattaaagagaaattacagtaagacccatttgtgtgcaaaatcaattttaggcttattacacttggcctgataatttgcataaaatgcagcaagaattcatcggccatataggctacttttgagttaattttcctgggtttttacctaaaaatatactattttggttagagtcttgtgaaaataaccaatgtgttcaattgttttattttaaaaggctcttactgaacactataaatatgtataagttgaatatacaaactatattgtcataaaatcacaacccaaaatgtggagaacgcagagggaaaggtaaatttgctcgcaaaaacatacttcacccaaataactggaaaaaaaaaaagactttcatgacccttctttaaccagagcagcagctttcaaacaaggtgtttgccttggaaatgccattcacaagccaaacggcccttgagagctgtctgtcaggcactgtagaatctagcagctcctcacagagttagaaatagtttcaggaaagagattccctgcttttagtaactgcactttatattcccagatagcgagattgtatgtaaaccatttttatcttattctggaactcttttgggtactttttttttttttttttaaatgatggagtctggctctgttgctcaggctggggtgtagtggtgcgatttcagggtatgagaaaatgcagctggacctggctctttccaggaagaccctcacagccaaggagtccaaagcctggggttttcatctaattccagtgtgactggggtaggagcagctttggtgctgggtgtgtgtgtgtgtgtgtgtgtgtgtgtgtgtgtctatgcctgtgtctgtttagggtgttaggctcgtggttgtctagatacaaatgtcccagggctcaggagccccagggttatgtcaggggcaccagatgaaggtgtcaacagaagttagggcacaagggacaaaggtgagagcaaggttagattcatttaggtgcaagaaatcatagagggaggagggagaggaagccctcctgctaccaccgaggaagaagcgcagcttaaggcagaaagcctgtccggagaggaagtgagtttgagggcagggctctctgggtaaagtacggtctgggacaccagcctgggggaagggtacagaatgcagagtggcctggcgtggggactaagaacagaggagagcagctttcactgggagggtcagtgttttcagtgtccagcactgagcaaggtgagatttgggcagcttgctgtgaaataaggtcaggctctggcattgtccccattgcgtgtgtgtgtgaggggcactttgggagagtgaactctccacctccatcctctcatacgtccttcaaccgagcttgccagttaccctgattccaaggagatctatttattgttgacaatactggatcctagcagaggctgggtaggagcctgggcacaagcaagtggaggagggggcctgggcctgaaagacctgggaggtttgagagaggacacagcccacagaatggagcagatggggtagagtcggcaagcattcagggctcctagtaagttggacaatggagaccctgaaagatccagtaaaacggggagaacaaacaggtccccaactcacatccttgcagtgcctggagcttcagactccagacaggtggggaaggaaaattgagggatgtgaacatgttggagaatgtcgtgccctgaagaatgaagaaaaggggggtgaggaatgagagcaggaacggcttccagtgcctggtgcccaggagaactcagaaaatgggtgtggtggagaggaatcgaggaaccggaagtggtggaagtgtgcagggcccctccgagatcactgtgactgccaggcgtcctccctggctggagagcttcactgtcctccttcccagccaaaatgtgtcccttgaaagcttcctccccaatggactggttctgggtcctatatatttgaaggggtggcctgcctctccacacctgtgggtatttctagttgggtgggaggagagacagagaaaagaaataagacacagagacaaagtataaagaaacaacagtgggtccaggggaccagcactcagcacaccaagggcctgcaccggcaccggcctctgagtttcctcagtttttattgattattattttcattatttcagcaaaaaggaatgtagtaggagagcagggtgataataaggagaaggtcaatgaaaaacatgtgagcaaaagaatctatatcataattaagttcaagggaaagtactatgcctggacgtgcactcaggccagatttatgtttctctccacccaaacatctcagtggagtaaagaataacaaggcagtattactgcaaacatgtctcacctcccgccacagggcagcttttctcctatctcagagttgaacaaatgtacaattgggttttacaccgagacattcagttctgaggggcaagcaggagacagtggccttcctccatctcgactgcaagaggctttcctcttttactaatccacctcagcacagaccctttatgggtgttgggctgggggacagtcaggtccttctcatcccatgaggccatatttcagactatcacatggggagaaaccttggacaataccccgctttcaagggcagaggtccctgcggctttccacagtgtattgtgcccctggtttattgagactagagaatggcaatgacctttaccaagtatactgcttgtaaatattttgttaacaaggcacatcctgcacagccctaggtcccttaaaccttgatttcatacaacacatgtttttgtgagctccaagttgggtcaaagtggctgggtcaaagtggctggggcaaagctacaaattaacaacatctcagcaaagccattgttcaaagtacaggtctttttcaaaatggagtctcttatgtctttcctttctacatggacacagtgacagtctgatctctctttcctttccctacatatattcatggaccacagtcttcaaggagtccatttcctcactgtttttggtttgatttctctgaaattaggaaatgccccattgaggcacccaggattgtctttacttcccccagagcttccactcctgaggcaggagcttctcaaacaccccccaagactcaacacctaatttcaccctctgaaaccttcccatttcttaaatccaggcagggtcatggtccttagcccctcagatgctgtggagaccttctttccctttcatacattctctcaagattaaaagccacccctcctcagcacacaccccagagactcaccccaacatgcattgcaaatcaccctggaaacagtcataagaccacactcatttaataatattttatttatcaaaagacactctttctcaggtaagtgaagttctggagaggaaaagaggagtcctgatgtaaattgccctgcaggccttgctgagatcacaaggagattgttactgcagcttgtagcacaatagtaaatttcttctctggatggaagttcaacaatccagatcgtagtatattccttttcattatgctcagtccagcaaatgtgatgataacaaattccttttcatgatcatccattcagcagagaaaatgtttgtaaatgtgttttcatgaagatgtttaccataacatacaggatttaccattatcaatgcatccacaaactctgctgttgttttttatacataattttttccatcgagaagtgatagttgtacatattcatgctgttcatatttcaaccacaaactctgctggtttttttatacgtaattttttccattgagaagtgatacttgtacatatttgtgctgttcatatttcatgtttcatcatccttttacaataaataggttatattgtattttaagtttttctaactgtagtgcagaaattgtactgggtgtatacatagatatcaaaccaaatttacttgttctggctgataatgcatcatttatttcatagattatgtatttctttgacacatttcacgtacaactaattgcataaaaatgaattttcttttagtatagacatcagcatgtgcttaattcggaatttaattgttgagttaaacatcgtcattgccttttccgttgttattaattgctctggtgggaattttgttatctcatacataagacagtgtgccacaatatctcttaaaatttcaatggcaataaactttatatttaaaaacagggaatctatggaaaacacatttttttctaaaggattaaaatatttttttaaaataattttctaaaaagttaggcacggtagcaaacgtctagagtcccagctactcaggaggctgagacaggaggattgcttaagcctacgagttgggggctgcagtgaactgtgattgcaccactacattccagccagggcaatagaagttaaccctttttctaaaaaaaaaaaaaaaagaaagaaagaaagaaaaaaagcaacaacaccaaaacctcaccaacaaaatggtaaagaaaaaaaaaacagcaatacaatgtaagctatttgatccaaagaagtcaatgaaatttaaaacaaatgaaagggaaaaagtaatacttgagtcctgcaggactcagtccaagttctgctgtgcctccctcacggtgagccacccctttagaagtcacttgggtcataagttaacccgataggaagtgtcctggccaatgaactagggaggtggtaaatggcaccattttaaatttaaattcacggccttttcaacggatcagtagccatgttgggtaagagtgcaaatgtcagaggtgaaaagaggcagcaggaccctcccctagtgcttgggcaacagaaggtggaatcactaaggggacaagactttagcatgctcaagtacacaggacagaaaacatgctttttacaaaagctggtaaatatgaagagggaacattttcaagttcctgtaaccaagaactaccgcctgtaaccggtgaaagtgactttctatggcaaaagcgtttttgaaaaggtgaggaagttaaatatcttaatgttgggaggttcttctggtttatctggctagaccctaatggaatcccaagtgtccttatggagcggggagcagagagagagatttgagtccagacgaggaagaaggtgatgtgagtctgggtgcgggacagggggagaatgatgctatgtggggatctgggctggggaatgacttagctgcatgagcggagtgacttagactcctgaactagaagaaatctagggctcatcacctcagcagccctaaccatcaaccttatttttattacaggtcttccatcgacggactccctaaaaagccagcggcgtggaggggcgccctctattggacaaatagatcttgactactttcggccctcaaatagcctgactaggcaaataacaaataataataatttttttttaaatcatggaaaatattttaaaaaacaattaaaaagttataaatctataaaatctgcttctgtctgtgtgtctgtatatttagatgtctcatgtgtacataatgtttcactaccaaaatatatgatgaaaccctcattaatcggcttagaaaactaaacacctaaatattttctcagaaaatacaaaaactttaactcaaatcccttttaattcacctgactttaaaaatctttaaaaaataaagcatgctttaaaattattagtaaagtaaaattagaacatcttcagaatttagacatttggtttaaattatacaggtcaaatactgcccttagtaaatattttcaggtcataaacaactcctgtaatcttttaaataattgaattacatgtctgttttagagctttaagttctagctaaagcctggggacaaatgaagggcaccatgccccctctctgtgctggaaagagacattttctacagctctgacccttgcagtaggctttgcaactgctacctatcaaaattgcctacatcctaagtttattattaaaaggagttgcttggagttaacattataatgaatatatgtaactaaaactatttctcatacaaagtatatgaaaaagtagaatgtatttttaataaaaagttataaaaagacatgaacatgtagtttttataaaaaacagtaattttgtctagttttgcagttctaaaaagttatgttaaattcaaaaataaaaaataacaagacaagactcaaggtttaaataagttgtaaaagatttgtaaaaattagttctataaaaattttacaaaaaaaagcattggttaaaatttaaggaattattttgtttttacagaaattaaacattcattaaaaacactctgatacaaggccttaatttgggttcatgtatcagaatagcagggttttcttagaatattaatctattctttaaaagaactatgaatgttatgcaaactttataaaaatcttaccttagagtcaaactgattaaaattccatagattttacgtaaaattttattaaaaattaacttcaacaaaaataaaatttgattttctcctttaaacaaaagttttgcgtaatattaaataataaagcatttttgtttaccttttaaactataaacacacacacacatacacatacaccaacactaaagtcagctgacctcatactgtctttattggatattcttgtttaaaaaactatcttctttggaaaataaagttttttattttaaaccatattttaaattatcattttgactaaatccataacatacagtgatctgtaataattctattttataatatcaagtgttttgaagaactccaggaacagccatgagagaacactgtggtttagtaacactttatttcctcagtttgaaaatagttgtctttcttggggaggccggtttcagcagatgaaaacaagagtcatgatgaaaattacccagcagtggttagtgtgaccataggaacattgtcatcaggtcagcagaaaacatatcagcaaatttttctcatactggcagtgtgtaggggtggatgtttacagttcctgaagccccagtggtcgtgtggtcttttagttttgccatttataggcaacttgtggtaactagctcaattagacacattccttatcacaaggacagagggctttctgtatcctagggttcttgccttggcattccagaagaatcaggtcacacgtggacgtggagaatgagtgcaaggttttattgagtggaagtagctctcagcagatgggggagccagaaaggagattggtttctccctggattggggccgttcagcagccctggctctcctctgactgccccaggcaaaatccacatcgttctataagtcggtgccctgctggtgtgctggtgcctgttgtcatgttcctcttcatgtccagccgcctgtgtgttcctccgctgatgtgctcctctcgacgtcaagcctcctgtgtgtctgactgctagggtcttggggtttttataagcacaggatgggtcttagcaggccaggatgatcttgggaaagacaacattcggtcaggaaaacaaaaatgcctgttgtcatctaggtccgtggggacaagcccaggtgtggagcttttagccagggaccacagcctcctgtatccaacacttcccttcaccttttctatatcattcaaagggatcatgcccttcccatcccagcacttcactttcatgtcatttgccccctctgaagaggtacatctaactgccattagaatatggatgatgaccagtcttagctgcttcctgctgaaagggggcattgttttgggggaaaacggcagtcagattcctcccaggggtctctataataaaagatcgaggtggctactttcaggaggtcctctaatgtactatctggtcccaagtcccatttctgcaacctcctcctgatgtcaggagctgcctgagtaataattttatcctttaggattatctgtccctcgattgaattaggagatagagaggtgtgatttaccaaggcctctcttagcctctccaggaaggcagtgggattttcatcaaatccctggttaattatggacaacttagtataattgagaggcttggtcttagacctacgtaagccctctattatgcacacctgaaagtgtctcctcttccagtcttccatctcattattgggatcccatttagggtccttcactggtgctacttctcttccagttggataatattcgctcccttccctgatgctataggtgatgcaaagctcatccccaaatctctctgctgctggcagagcagcctgcttctcagtgtctatcaggttctgactcaaaagtaacataacgtctctccaggagagttcaaatgttagggtgaaattctggaaagcttctatatatctatcagggtcatctgaacacttgcccagatctcccttaatttgctttaagtcttgtagggaaaagaggacttggaccttactgggcccaaattcactgggcatctgtaggaggggcaagagtgagactgggcttgtttgggatgaagatttctaggaggggccaggtgagaggctgaagctggatacggaggttggggtggacccagaggagcagggcttgagggagctggcacgtcagctgggggtgcgtctgggactcgtgtctttaattccctgggcttgaccctggcagccttccccgagacagcaaacaggagggctggaacaatcctacatgtcagcaaaggtctggattgctttgcaaggtatagaaagcctgcacatttggggcctcagaccatgtgtcctcacatccagagaaaagttctaattgcaggatggtattgaaatgaatggtcccttcctgaagccaagccagtccttcctgtaaaccataatttggccaaacctatgtgcggagggctatgagatgcttttcctctggattctgagggtcaaaacagtcccaatggttcaggatacactcaaggggagtacaagctgggggtggtgaggagaactggctgcccattctgaaagacagggaatagaggtgttcctcatttcccttccttcttttggcaaaaagctcagggtgtgatggggagggaaagcaagcatcttcacttcactttccacctcttacccctgcgccctggcaaccttggcaggtgccggccacaggtacaaatgcggtatgtacccatgaagcagggagaacctggagattaggaattaactgccctcacctatgtttccttttctccctgctgttgaaaaactttgagttccctgggcctttttatcccatgaggcatggcctccttctgtgggatggggttcagtcagcaggaattggtcctgtccatttacattgtgcctgttgcctggctttgaattcctcagacctgctttctctttctagggcctcagcctgaagcttggaattgagtttgggactgaaaaagcatttcagaggctgtttatatccatttagtgcctcaaataagccctgctgaatttgcaattatcagccagcaggggtcactcctctgttaacttccctattagaaacagagcggtggggattctcacttagaaaagaaaaaaagagaaaaacagttaaagaggcaaaaagtggggaatgctgggggaagaaccccttgcttagtgcaagtgggcccctctaatccttataactttcccatccttcccccagttcagaccaggttgaattccttggccatggaaggaaaggttccattgatgcagtgggtgagaagcactctgtagggtcctggctaccatcggttttctcacacccccctcatcccaggcagtggagggagacacttctgcgacattgctccccctgccccttcatggctattgggtgtggcctttgcctgctgcaggcatgcctaggtgctggagctgggagggaaaagggtaaggagaggtgccctggaagccgctcatgcctggggctgtcaaggtggaggcatacatggcacctctaggaaaaattggtctgatttgcacctttggcggctgagccaaatgctcattttacttagtaacattgcctcagcctgtagcaaaactcttaacattataaaggaagagataagatccatttcaaataatgtgtgagagagaaaagagatgaaaggaaaacagagtcttttacctgcaggaaagggagagaagtggcagagttttggaagaaaggcaggcccaacagtttcccattcactcacactcaccttccgagatcccagacgagccaccagttgaaatgggaaaagtttccttgtccccctcacaggaggtggagtgggggtgtggcttgcttctttagtactccgctgctcaaacctctagggaagcatacagactggcaagttgtggggctacaaccccatggcagcatctaggggtagatgtttacagctgctgaagccccagtggacatgtggtaccatgtgctcttttagttttgccatctataggtggctttgtggtaaccagctcaattagacccattccttaacccaaagacagagggctttctgtatcccgcggttgttacctaggtgtaccagaaaaatcaaatcacacgtggtcttggagaatgagtgcaaggttttattgagtggaagtagctctcagcagatgggggagccaaaagggagaatagttttcccctgaagtcgggttattcagcggcccaggctctcctctggctgccccagccaaactctatgtcaatccattggtcggtggcctgccagagtgctggtgcctgttggtggattcctctcagcgtcgagagtttttccctctcaggaaagggagagaagtggcagccacccatgtgttcttgcactgatgtgctcctctcgacgtccaacctcctgtgtgtctgcctgctagggtcccagagtttttttaggcacaggatagggcatggtgggccagggtgatcttgggaaatgcaacatttggtcaggaaaacaaaaatgcctgtcctcatctaggtccaggggcacaagcccaggtttggagccctagccagggaccccggcctcctctacccatcactttccttcaccttttctgtatcattcaaagggaccatgcccttcccttcccagcacttctcttctgtatcaataggtgatgtttttaaaatttcccaactctagtgcaggcatggtactagacatatacatagaaataaaaccacacttattcttctggctggcaagacatagtatttttgccaaattatgtgttgttttgaagcattttatgtacccctggtcatataaaaataaagctattttgttcagtacaaacagcagcattttctggattagaaagttaatcatcttaaaagatcatcacggatttttccattgcactcatcactaattgctttggcaaaaaatttcttatctcacgcatgacaaaatcagccgcagtatctcctagtaatttaatggtgatgatctttataaaggaaataagcacatcaagggaaaacataattttttttaaaaaaagagtaataaaactttttaaaagtcttttttaaaagactgcttttctaaaatagtaaaataaaactccaccaataaaaccaccaacaaaacagaaaagaaaaaataatgatatgatcggagctatttgatgaaagatggtaaattaaatttaaaatgattagaagagaaaaagcaatacctgtctcccgtaggtctcagtccaggttctgctatgcctttctcctggtgagccacctatttaagagtcgcttaaagcatatgttaatccaacaacagcagattaaaaaccaatgcaatctgaactatttgatctaaaaacataaataaaatttaaaacaaataaaagagaaaaagcagtacctgtgtcctgtaggtctcagtccaagatctgctctgactcccttgtggtgagttagccctttagaagtcacttggggtggggcatatgttaattccactaacattggttctggccaatgagtcaggaaggtggtaaatggcaccttttcttcttgctgatttctttcagttcctttggagtctggacattagtcctttgtcagatgcctagtttgtgactactgtttcctatactgtgggttgtgtgtttaccctgctgatatttcttctgccttgcagaagattttcggtttcattaggtcctattgatcttattctatttttatatttttgcgtttgcttttggggcattagtcatgactacttggcctaagccaatgtctagaaaagctttttggatgctatcttgtagcatttttagactttcaggtcttagatggaagtttttatatgctttgttaaagatcaggtgactgaaagtaccgggctttgtttctcggttctctattctgttccattgctctatgtgcctatttttatacttcctgcaccatttattgaataaagtgtcctttccccaattagtgtttttgcatactttgttgaagattagttgtctgtaagcatttggctttatttctgggttctctattctgttccattgctctatgtgcctatttttatacttcctgcaccatttattgaataaagtatcctttccccaattaatgtttttgtgtactttgttgaagattagttgtctgtaagcatttggctttatttctgggttctctattctgttctattgctctatgtgcatattttataccagtatcatgctattttggtgattgtagccttgtagtataatttaaagcctgccttcagatttgttctttttgcaaagtattgctttggatatgcggtcacgtttttggttttgtataaattttaggattcttttttctagttctgggaaggagaatgatgatattttgatgagaattctactgctctgtagatggctttggagagtatggtcactttcacaatattgattctacctattcataagcttataatgtgttcccatttgtttgtgtcaactgtgatttctttcagcactattttgtagttttccttgtaggaaacttacattaacctacttggttaagtatatttctaagtattttacttattaaaaattctcagggaaatgcaaagtaaaactgaggtgggaaattaaagaaaaataaaattaaaaagaaagggaaataagctttcttgtattaagctaacttgtcccagaggcagcaacaggcacagcccagacccaggaaaagtcttgataatattatttattgtattctggagactcttccagcactccttcaatgtagggagaagaaaaacaaattttcctttgttttatggtatgagtttatagattcttgttctctttaactagtaacttcaagtattctgttttatctaagaagtatggcaaaggtcatgagaagcctgagcaggcctgaactacagctctctaggcaccatagtgaagataaaccaatgcaagcctctttagagcaaaacctagataatagacatctgggttgcatagcaacagttatgtgcaatcctgagttatgaacctgttacaatttgattaactgtctttttcctgcctctgtatccctgctttcacaccactgtaagcttgcttcaagctggcccacccccttttgtgaagtgtgtataaaagtcaagtgctgtctttgttccaggccctgtctttggacgtgagtctgctgggcctgagagcactcaataaaagattctcctgttttaacccaaagcctctctctcatcctcctaaatcccacaacaaaaccacaatgagatgctatcttaatcttgctagaagcccataatttaaaagtcagaaaacaatagatgttggcatagatgtggtcaaaagggagcactttgacactgctagtgggaatttaaactagtccgaccactatggtaaacagtatggggattccttaaagaactaaaagtagaccattcattccagcaatcccattactggctatctacccaaaggaaaagaagttattccataaaaaagacacaagaatatggatgtttatagcagccgattcgcaattgcagtgatatgggaccaacttaagtgcccatcaacgaacgagtggataaagcaaatgtggtacaccatggaataatacttgataataaaaaggaacaaaataatgtcctttgcaacaagttggatggaactggaagccattattctaagtgaagtaactgaggaatggcaaatcaaatattgaatgttttcacttttaaatgagagttaagctatgagaatgcaaaggcataagaatgatataatggacttggggactcagggggaaaggttgggagggggatgaggaataaatgatgacatattgggtatattatacactgctcaggagacagatgcctcaaaatctcagaaattaccactaaggaacttttatccacataaccaaaaaccacatatattccacacactattgaaagaaacataaacattattttaaaaaataaagccacttttaaaattagcaaaataaaataaatatgtcttcagagtttagatattggatccaaattagacagatcaaatactgcctttactaaatattttcatgtcattaacaacttctaaaacctttcaaacagttttttgacatgtcttggaaccatccatttctagctaaggcctgggcacctgtgaaatagggccatgcccccccttatactgggaagagtaagatatttcaagactaagatgttttctacagctccatctttttctttaagctctacatcaaggacataattaaaattggttgtctcctaagtggtttactaaaaatgcatacttaagagttaccattataattaatatttgtatctaaagctacttaaaaattttcacacacaaatctgactgaacaagtaaaatatattttaagtcaaagtttataaaaggacatgagaacatagcttttatgaaaaaattagttttgtcaagtttagaggttttcaaatattttaaattcaggaaataaaataacaaaaagacaaaagaaaatggttgaacaacttagaaaaggtttgttaaaattcatcttataaaacaatctacatgtaaaaagtgggctaaaatttgaaagagattatttaggttttccataaattaatccagaaggggtaggaagtcttaagaatgaggaaggacaggaggaaggggaggtcatcctgacactgcagaggcagaagtgcagctgaaggtatgaaggctaagaggggaggggagtttgagtgctgctgcctggctgtcagagcagaggagggtcctgggcaccagacttgaggaagggatgaaaatgctgggcagacctgtagtgggcccttgagatggcagatagtggtttccagagagagggccattgttttccagtgcccagcactgagcagagagagttttgggcagtgtaaaaaaaaaaagagaacttacctctttctcgttttagaaaaagaacagtctaagaatatcagcagggaaactctcagtgcttcaaggggttaaacgcccttttggctttcttgtgttggtttcatcatagaggaggagaaacttcttggaagtgttcctaaaaacacaacacgtctgcttctcctttcaaaaaaggaagtgctaaaacacgaacactctagatccaaatattaatacggatgtctaaatgcttccgttttccaaggggcagaaagctaaaggttgtaacctattcatttcagtcaaagttggtgaaagggaagcaaaggaactgggtggggcttggaaggatgacgaagctcaagctcattggccagcaacctctctcctgggggcgggaggggtgagcatacgtcattgctttggcttctataaaatgaggaggactcaccgagtgtgaagagtccttctggtgattgcagctgagagcacactcacgacgttctgcaaggattctctgattatgattctgaagggaaaagcgatggaatggacagcagagattgtaattttctttatcttgaattacggaagaaagtatctaggacagaaatccacgacaagtccttggaaccagcagatctcttcgttcacggagacgttgacgtattctctattgaagaagattcttaccttcttactggacaaggttttgtcagttctgcgtgactggattgtccgggagactctgaggaaactgatgtcacatgtttttccaaagaagatgtttctggaaccaacaactgtgattgtggtttgaggacttctgagagttccagtacaggaaataagcagaacatcagctggaggctaaacggatccagacttcactcttcacttcccttcctattcagtctattgtgcctgctgactgagaagcttggctggtatgtgagcaaataaacggaactattcagaaggagatgttgacatattctgtattgaagaagatccttatcttctcacctgacaaggttttgtcagttctgtgtgactggattgtccggaagactctgaggaaactgatgtcacatgtttttccaaagaagatgtttctggaaccaacaactgtgattgtggtttgaggacgcctgggagttccggtatgcgaaataagcagaacatcagctggcggctgaagggatgcagcctccactcttcacttcccttgccattccatctattgtgtctgcctgactgagaagcttggctggtatgtgaggaaataaacggaattataaacaaggagattgtttctcatctacttcattctgttgtggcttttctattttggggttcagggtgtgtgacaaggaccaaggagatgaaaggtttcatgatggagaaagcccaggcaatcagattgaagagctatccacagggaatcttggctgctgaggggctgcaccctgcaacggactgaccatatgacagaaaagggttttaaaggctcaacttctggactgagaacccagagtaatttgggaacctcctctgtgaggagatatgaaagctgggaatcatgacatccctaggaatggaaggcacatttcctgatggaaggggtgctttggaaaacaggagcagagtagacacagcagccttgtggatacgggtgggcagcatgcatgggtgatgtgaacgtggagtgtttgtgatcgaaactcaaaatgtctgacaaagtgaaaacctagaaaccacaatgaggaggaagagtttgtgagggcaatcactctccccatgtgtgaaaatcgggggctcttaaaatctcatctggagaggtgcagtctaccaaactctgggactttagcctccccttttaaaaaaccgtgcatcaataccaacgtccgaaaccacagaaataacacctggcttgcatggagacaaggacaaaaagccgtcatgatgagttgttctgctcacttgctgcctctgttcagtgcacaggatattgtccacccactagcaggctactgcaagagaagtgtgcaatatgttccctatgtgccatatatgtgccatatggcccatatgacaactgagtcagaaaatatctgatgccctcagagttacactccacctggagcttgcccccagccatccaggacctaggctccctaccctgtccaattttctggtgttttgggggcttcattctctaaggtgtgcccactctttactcaaaccaaaacacccacatattcctgcccatgaacaaccaatcaaccacttctcagttccacatcctgctgttgggtctctagtggtgacactgtaactcccaggtcatagtggtgacactataacacctagctaaattgatgccttgtctctaggaggccatgggctcctgcaggtctcatctgactctctgtagccttccctgacaatgctcacaatacccaagccagagccacattgacagcaagctgctctcatcttacctttgccagacctggccactggaaaaggctgaccctcatcctgcaatgcctatacctccaacctttgtctcaagctggtgtcctggagggacttctaagcagaaaacagattcagactcccatcctctcctgaatggcctcatatccaattctcagaccctcagccttcattgtaaggacacttcatccatgcccttgagtattctgtctgcactgtgtattctgcaatagattctcctccctctgcgaccctcaactccttccgcagactttttgttttcttgatcatctaccatagtcttccactgggacactgccaagcccattctggagagtgagttgtgcaagtacactgccccccatctacctttcgggaggtgtatacacccttctttctcccaggtctggaggctttctattttcatcctgaggcatctccacctgctcttggattcttcaaattgacaaccaccagttaacaagaactatgtgtcaccaaatagccaaacaatggcaattacaaaaataaaattaatagctgtaacccccattagcaaggatacacaaatcaaatcagggatagtgggtgaggaagtctgcctaacattcaaggaaggattctgaagtgatacaaaatcattgcctttgctatctttagaatggacactttcagccaggcacagttgctcagcctgtaatcccagcactctgagagccccagttgggtggatcacttgaggccagcagcttgagaccaccctgggcaatgtgcagaaaccccaactctactaaaaatacaaaaatagccagttattgtggcacatgcctgtaatcccaactccttgggaggctgaggcacaagaatcacttgaatctgggagccagagtttgtaatgagcgaagatcatgccactgcactctagcctaggcattagagtgataatctgtctgtggaaaataaaaacattcctcttcaaagttttcttctttaaatcataaatgttggaattaatatatcctctttgaaactcactttcttcaagcttctttatttgatggtagtaaatctttgttaagctttatgaggcaagagtaatggaagaagcatattatatatatttatactctaacctcagtgcttgttctagcaagctcaggcatgcgtgaatgtgcccaggcatgttccagcccataccttatatcctttccttattgggaaatgctgttactcctataagcattcttgtaagcaacttcctctttttctttgtctccactatctttacctattgaggacagttttaggttcttagccagttggatgtagcatagactgtgaggtccaaccccagccaatggagatagcacacagcagtagcgacctcatgcttaacagataaatattcctgtctccctttgtttggggtgctctcagctgatgagcaacaccctttctaaagaaattaaagttgtcttgctgagaaaacttttggtctaaatgctgattcttccttgcagcactgaagaagaagcaattatttccaacactttctcatacacaaaaaaagaagaaggtggaagaaaactttcttgtgcaccctatccctcactcagaaagacaacagaaggctcctagtggcaagccctagaggattcatttcttttgggaaccctcttggctgggatactaggactcaggtcaaactcagcattttcagtgtgtgggaagtgtgcttgggtttcactgttacttccaataatgtgatttggtccttggggttcaccaaattttggtatggagtggtgaaccctgttaagtttaagtgtctataaaattaacaaagcaaaataaccattctgccccatggttcagagaccaaatattgtgtaggaaatgctttagcgagagaaacagagaagaataaaaaatgtcctcaagcgctgcattatttcttgttatcgtccagatcttagaggaaaggctttcattttccctcattcagtatgatattagctgtgcatctgtcatttatggcttttattatgttggggtatgttccctgtgtatgtagttttttcagggtttttgttatgaagtgatgttgaactttatcaaacgtttttcagtttcagttgaaacgatcatatgctttttgtccttcattctcttgatatgatgcatcatgttgatgatttccatatggtgcactgtccttgcatcctgggcatgaattccacttgatcatgacaaatgaatttttaatgcattcttgaattccgtttgctggtattttgttgaggatttttgcatcaatattcatcagagatattggcctgcagtttctttttttttcttttttctttgttttgttgtttgtttgtttgtttgttttgatgtgtctatgtctggttttggtatctgggtagtagtgttccatccccttttattttttagaataatttgaataagactggtgttggttctttaaatatttggtagaattccgaagtgaagtcattgggccccgggcttttctttagtggaaggctgtttattatggcttcaatctcgttacttattattggtctattcatgttttgaatttgttccttatttaatcttggtaggctgtgtgtatctaggaatttgtccatttcttttagattttcaaatttattggcacataattgcccattgtagcctctaatcgtcatttgagttcctgcagtaccaattataatgtctccttcttcatttttgattgtatttatttggatcctgcccctttttttcttacttaggctgcctaataatttcttaattttgttgaactttttcttttgtttgtctcgctctgccaccaggctggagtgtagtggtgtgatcttggctcactggaacctccgtctcccaggttcaagcaattctcctgcctcaccctcccaaatagctgggactacaggcaagtgccaccactcccagctaatttttgtatttttagtagacacgggttttcaccatgttggccaggatggtctcgatctcttgacttcataatccacctgcctcagcctcccaaagtgctgggattacaggcatgagccactgcgcccagcctaattttgtttaaattttcaagaaatcaacttcttctttcattgatttctgtattttttatttccattttatttatttaaactctaagctttattctatcttcttctcattttagctttggtatgcttattgcctctctagctctttaatgtgcattgttagattgtttatttgaagttcttcctctctacaccataagacgtaagcatgtcctcattatgtcataagatgtaaccacttacagctataaacttccttcttagttctgcttttgctgtatctcataggctttgttatgttgtgtttccattatcaattgtgtcagaaatttttcaatatttttcttaatttcttcattgagcaactgatcatttgggagcatatttttaaacttccatgtacttacatagtttccaaaatacctcttgtgatcaatttctagttttattccactatggttcaagaagatgcttgatattatttcaattttttttcacattttaagatgtgttttgtgacctaacatatggtctactttttttttttattaaactttaagttgtggggtacatgtgtagaccgtgcagttttgttacataggtatacacgtgccatggtggtttgctgctcccattaacctgtcatctacattaggtacttctcataatgctatccctcccctaacctccaccctctgacaggacctggtgtgtgatgttcccctccctgtgtccatgtgatctatttttgagaatgatccatgtggattagaatgctgtggaaaagactttggattcctaatatccagggagggagacgatgatattactttcaatatcacacgggtgtacacactctctgtgacattgttcctaatatccagtggaagagaggatgatataacacccagggagggagaggatgatattactcttaatattgcagggtgtgtacccatgcctatgatattgttcctaatatcaggagggggagaggatgatattactcagaatatggcagggggtgtacacacactctgtgacatggttcttaatatacaggggagaatgggacaatattactctcaatatcgcagggggcgtacaaccctgtgatttgttcctaatatacaaaaggggacagtatgatattgttcctaaaatcgcagaaggtgtacaacgccctgtgatattgttcctaatatccagggcgggagaggatgatattacccccaatatcacagggggtgtgcactttccctgttacattgttcctatgatccgagtggggggaaatgacattagtcccaatatcgcaggatgtgtacactactcccccatgatattgttcctaatatcaagggggagagaggaggatattactcccaatatcgcaagggaggtacatcctccatgcaatattgttcgtaatattcaggaggagagaggaagatattactctcaatatcgcagaaagtggacacccaccctgtgatgttcttcataatatccagggaagcagacgattatatgactttcaatatcgctgggagtgtacatcccttttgggatattgtttctaatatccaggaagggagaggattatattacttccagtattgcagccagtgtacacatttcttgtgatattgttcctaatatccagaaagggaaaggatgatattactcccaatattgcaggtggtgtacacccccctctgatattgttccttacatcaaggaaaagaaagaagaatattactcccaatatcgaagagagtgtacacccctcctgtgatattgtatttaatatccatggggaaagaggatgttgttactcccaatatcgcagggggtttacacccacactgtgatattgttcctaaaatccagtgaaggagaaaataatattgctcccaatattgcagggtgtatacaggccctcccccgttatattgctcctaatatccagcggtggagaggatattactttcaatttttgcagggagtgtgtaccccctctctgatatttttctaatatcaaggatgggaaaggatgccattactcccaatatcgcaggaggtgtacatgccctgtgatattgttcctaatatccagggaggtagaggatgatattactttcaatattgcaggggctgtacaccctctatgatgttgttattaatatttaggttgggagaaaatgatatttttcctaatatcctgggaaggaaaggatgatattactgtaaatattccagggagtgtacaccttcctaatattctaatattgttcctaatatccaggggtgggagaggattatattactcccaatatcgcagtgggtgtacacccctcctgtgatgttgtttctaatatccaagcgaggagaaaatgatatcactctcaataccgcagggggtgtacaccttccccatcatatcgttcctaatattcagagggaaagaagatgatgttactttcaatatcgcaggggttgtacacaacccctgtgatatttctcctaatatccaggaagaaagaggatgatattgctcccattatagcagacggtatacgcctccctgtaacattgtttctaatatcaagactgggagaggatgatatcacttccagtatcgcaaggggtgtacacctcccccgtgatattgttactaatatccagggggaagaggataatattactttcaatattgcaggggctgtacacccccgtgatattgttgttaatatttaggttgggagaaaatgatattagtccaaatatcgcagagagtgtacacacttccgataatattgttcttaatatccatgggggagacgatgatattacacccaatatcgcagggggtgtagtctccccttgtgatattgtccctaatattcagggaagtaaacgatgatgttagtgtgaatattccagggagtgtacaccccctttgtgatattgtcctaatatccgcaggagagaagataatattactcccaatatcgcagggggtgaacacaccccctgtgatattgtttctaatatccaagcgaggagaaaataatattactcccaatgtctcaggggatatacaccttccctatgatattgtttctaatattcaggtggaaaacgggtgatattactcctaatatccaggaagaaaggggattatgttactccccttatagcagggggtatacacctcccctgtaatattgttcctaatatcaaggctgggatatacgtggggggaaggatgatattactcccaatatcacaggggttataaaaccttctgtgatattgctcctaataaccatggcggaagaagatgatattactcctaatattgcaggaggtgtacactcccccattatgttgttcctagtatgcagaaaaggagaggatgacattattgccaatatcgcagggtgtgtacaccacccatgatattgttcctaatatttagagggacagaggatgatattactcccaatatcgcagggggtgtacacgcatcccctgtgatattgttcttgaaatcgaggggaaagagaattatatttctctaaatattgcagagggtgtacaccgccccctgtgatattgttcctaatagccgggggcggggggagataattaaattactttcaatatctcagagagtgtacatcccccttgtgacattgttcctaatatccagagcaaaagagaatgatattcctcccagtatcgcaggaagtgtacatttaacctgtaatattgtttctaatatccagggggaagagaatagtaatactcccaatatcgtaggggttgtacaccttttctgtgatattgttgcaaatatttagaagagagagagaatattactcgcaatatcacagggaatgtatacttcccctgtgatattgttctaatatctagaaaaagagaggataatattactcctaatattgcagggggtgtacacccccacttgtgatattgttcctaatataaaggaaggtcgaaaaacaaacggggagcccagggggaaggaaggcaggcgaggaagaggcagcgccggggcgccggagggagcagccgggccgcggaagcgcgagcacgagaccggtcgcggtcgcagtcgcatttttgccgttgtcgcggccgccgccgccgaggcttacccggggatgtctgagcccgcgcctcgcggcccccaagctccacgctgcgcccgctgtcccggcctctaagggccgccacgtccctgcggcgcgcgcaggcagaaagcggcttcgtgccggcggagggggcccgggcgggccgggaaaggctgccccaggccccgcgcctaccccatcaccgcggccggcgccgggccgggaggatgagcggtgtggggctctgaagcatggagggggttttgtacaagtggaccaactatctcacaggttggcagcctcgttggtttgttttagataatggaatcttatcctattatgattcacaagatgatgtttgcaaagggagcaaaggaagcataaagatggcagtttgtgaaattaaaggtgacagctttggaggggaccacccttgattggatacataaattctgttcattcagcagacaacacaagaatggaattaatcattcctggagagcagcatttctacatgaaggcagtgaacgcagctgaaagacagaggtggctggtcgctctggggagctccaaagcatgtttgactgatacaaggactaaaaacgaaaaagaaagaagtgaaaccagtgaatcgctgaaaaccaaaatgtctgaacttcgcctctactgtgacctcttaatgcagcaagttcatacgatacaggaatttgttcaccacgatgagaatcattcatctcctagtgcagagaacatcaatgaagcctcttctctgcttagtgccacgtgtaacacgttcatcacaacgcttgaggaatgtgtgaagatagccaatgccaggtttaaacctgagatgtttcaacggcaccatccggatcccttagtttctcctgtgtcaccttctcctgttcaaatgaggaagcgttctgtcagccaccctggttcttgcaccagggaggagtagccactgtataaaagaaccagtatctgcacttcaccgactctcccagcgacgccgaagaacctactcagatacagattcttgtagtgatattcctcttgaagacccagatagacctgttcactgttcaaaaaatacacttaatggagatttggcatcagcaaccattcctgaagaaagcagacttatggccaaaaaacaatctgaatcagaagatactcttccatccttctcttcctgaagaaactgtagtgtccaactttctctaagtattgctatgcaaaagctgctgtaattgaactattgttatagggagtagttttttcccttaggactctgcactttatagaatattgtaaaacagacaaacaagaaaacaaaccacatacttttgaagcgtgttttatctttatatagtttgtttgcaagagtattttcctaataacttcacagtatgaatgtgcatcttttttttctttttttaacaaatgatggtgtaacattttgacatccataaggacaaatgtagatatttttctaaaaaaccgtgaggggactgacagcttggtcagggtgtattgtagcttataaacatgaaatcttacaaggtttcagtttgacagaagtgtgatatatgtaacttgtgccatggaccaaatggtcactttaccacagctaaaaatgagttatgatagcagcttgatggtgattgcattgtattcctttaatcaaaaaggaaacgcaatattctaagtatctttagcccaaataccatgacatattgagcatctttaaataaccagactgtattgtccttcatatgtgaagttgacactactgatttgtcaataccaaattttgggttaaagtgtttaatttttatttatttattttcttgttgcctcaaaagatgattgcattctaacttttgtgacctaccaaatttaagatgtgtatacattgttctttacgttgttctagaaaagagattttaatgctgtagtgacttagctcacttacatcagagaaataaacaactttcaatggaaaaaaatatatataaaggaaggaagaggatgatattacttctcatatagaaggggttgtacaccccccttgtgatattgttcctaatattcagggagggagaggattatattactcccaatatagcagggagtgtacacccccccccccgtgataatgttcctaatattcagggaagcagaggatgatattactttcaatatcacagggggtgtgctgtccccctgttatattgttcttaatattcaggggggagaggatattattatgcccgatatcacaggagaagtacaccccacaagtgatattgttcctaatatccaggggtaaagaggatgatatcgcaggtggtgtacacccctccccgtgatattgtttctaatataaagaaggagagagcatgatattactcccaatatcgctggaggtctacaccccccttgtgatactgttcctaatatccaggaagggaaacaatgatattgctgtgaatattccagggggtgtacacccctttgtaatattgttcctcatatccagggggtagagaggatgatattactcccaatatcgcagggggtgcacggccccactgtgatattgtttttcatatccaggaggggagaggatgacattactctcaatatggcagggggcgaacaccccctgtgatattgtgctagttaggttgggagaaaatgatattactcccaatatcgcagggggtgtacaccgctcctgtgatattgttcctaatatccatgacgggagaggatattactcccaatatcgcagggggtgtacctctcccctgtgggattgttcacagtatccaaaagggaagaggatgatgttactcccaatatcacagggagtgtacaccaccattgtgatattgttcctaatagccagggaagaaaacgatgatattattgtgaatattacagggggtgtacacaccccctgtgatatggtttttaatatacaggttggaaaaggatgatattactcccaatatcacaaaaggtgtacacacccccccatgatattgttcttaatacttcggtggggagaaaatgatattagtctccatatcacaggggtgtgaactcctccggtgatattgtttttaatatcaagaggggaggagatgatattgctttcaatatcgctgggggtgtacatccctcctgtgatattgttccttatatccaggcgaggggaaaataatattactcccaatagtacacaccccatgtggtattgttcctaatactcagggggaaagaagataatattactttcaatatcacagggtttgtacacctttcctgtggtatagttttcaatatccagggggaaggtacatgatattactcccattgcagcaaggggtgtacacacctcctgtgatattgttcctaatatccagaagtggtgaggatgatattactcccagggggtgtacaccccacctatgatattgtttctaatatccaggggaaaagagtgtgatattatgcccaatatcgcagagggtgtacacttatcctgggatattgtttctagtatttggggagggaggagaggatgctattattctcaatatcgcagaaattgtacacccccgctgtgatattcttcataataatcagggaaaaagaggatgatattactaccaatattgcagggggttacacttcccctttggtagtgttcctaatatccaggaagaaagaggatgatattaatcccattttccaggaagtgtacacccaccgtgtcatgttgttcctaatatccagcagggaagaggatgatattactcccaatatcggagagggtgtacacttcccctgttatattgtttctaatacccagggggaagaaggatgacattactgccaatatcacagggtgtgtaccccaccctgctattgttcctaatattcaaaaggaaagatgaaaatattactcccaatatctcagggtgtgtacacctctcctgtgatatcgttcctaatatccacaggaagagagaatattactctcaatattgcaggggggtgtacacccccctgtgatattgttccaaatattcgggcggggagaggatgatattagtcccaatatcgcagggggtgtgcaccaacctgtgatattgttcctaatatccatgcgggggaggacgatatcactctcaatgtcgcaggaagtgtacacctctcttgttatatttttcttaatatccaggagggaaaagatgatattactgccaatatcgcagggtgtgtccaccccccttttatattgttcctaatatccaatggaaaagaggatgacattgctctccatatcccagaaggtgtacaacgcccctgtaatattgttcctaatattttgggggaagagaggatgatataacttataatatcacaggaggtgtacaccacccctatgtattgttcctaatatcctttaagggagaggatgatattactcccaatatctcaggtggtgcctattccccctgtgatattgtttttaatatccaggggaagagagtatgatattacgcccaatatcgcagggggcatacaccctctctgagatattgttcataatatatagagggagagaggatgatattacttccaatatcagaggtggggtacaccccccggttatattattcttgatatccaggaggggagaggttgatattactggatatatagcagggagtgttcacatcttctgtgatactgttcctaatatccagaaaagtagaggatgatattactcccaatatcgcagaacgtgtacacctccctgtgatattgatcctaacattcaaaggggagaggatgatattactcaaaacatcacagggcatgtacactcccctgtgatattgttcctagtatccagaagggagcaagataatattactttcaatatcgcagggggtgtacacccctctttggtatgtttcctaatatccagaaggaaagagggtgctattactttccatattgcaaggggtgtacacccccctgtggtatggttcataatatccagggagggaaagggtgctattattccccatatcgcgaggcatgtacaccctgctgcggtacggttcctaatatccagggggaaagaggatgctattacttcccatatcgcggggtgtgtacacccccgtgtggtatgttttgtaatctccgggaacgaagagggtgttattacccctcatatcgctggaaatgtacactcccctgtggtacggttcacaatatccaggggattgagggtgctattactccccatatcgcggggggagtgcacctccctgtggtatggttcgaaatatccagggtaagagagggtgctattattccccattttgcaggaggcgtacacccctctatggtatgttttgtaatatcccaggtaaggggtgctattgagagaagagagcaaaagaccccccccatattgttctgtattattttatactcagtacctgttttaagaagaaacaaggaagcgaaaccaaaggcaggcagcccggcgccaggcaccagatccaaaaccagacccgaaaccaggcctgggccttcctgaccttagcctgaaagttaaaattcaacccatgacctagcaactgatgttatccatagattccagacattgtatggaaggacattgtgaaatttcttgttctgttctgtttcactctgagtactggtgcatgcagcccttgtcacatacccactagattgctcaatcaatcatggccctttcatgtaaaaaccttagtgttgtgagcccttaaaaaggacagaaattgtgcactcaacaagcttggattttgatactctagtctgctgatgcttccagctgattaaaagccacttccttcactacctcggtgtctgtgggattttgtccgcggctcctcctgctacactgtgactccccttatagagaggggtgtacacccccctttggttcctaatatccagcgggggagtaggtgctattactccccatattgcggggagtgtacacccccttgtagtacggatcgtaaaatcaaggagggagagaaggtgtaattatccccatatcacagggagtgtacacccctttgtggtatagtttgtaatatccacgacgggagagaatgctattactccccatatcgtggagggtgtacaccgccctgtagtatggttcgtaatatccggaaggggagaggttgctattactccccatatggtgggaagtgtacacccccatgtgatatggttcataatatccaggggggtagaggatgatattacccacaatatcatagaaggtgcacacccttttgtgatattgtccataaaatccagaaggggagaggatgatattacttccaatatcacagggggtgtgtagccccatatgatattgtttgtaatatcaaggtagggagaggatgctattccttacaatagctcaaggggtgtaaccttcttgtgatattgtttgtaatatccagaaggggagaagataatttttttattttaaaagtaaactttaatgtcaaaaatgcaaacttgagaagggcagaaagatcaaacagaaggctgccacttcacaattggagggttgcacagtggccgggcagaggcgctcctcactccccagacggtgaggcagccgggcagaggtgctcctcacttccgagatgttgcaggagccgggcagaggtgctcctcacttcccagaacagggggctgccgggcagaggtgctcctcactgcccagacggtttgcaggcctggcagaggcactcctcacttcccaaacggagcagcggcaagccagaggcgctccacacttcccagatggtggggcagccgggcagaggcgatcctcacttctcagagggtagggcggcccagcagaggcgctcctcacttcccacatggtggggcggcaggctagaggcgatcctcacttcccagacggtggtgtggccatgcagaggtgctcctcacttcccagatggtgtggccgccgagctgaggcactcctcacttccctgacagtggggcggctgggcagaggcgctcctcacttcccagacacttggactccgggcagagactctcctcatttcccagatggtggggctgccgggcagaggcgctcctcacttcccagacggttcagaggccgggcagaggcgctctggggagaggataatgttactcccaatatcgcagggggtgcacactccctgtgatattgttccgaatatccagagggggaaaggatgatatagctcccaaaatcgtggggagtgtacacccccctgtgatcttgtttgtaataccaagaagaaaagagaatgctattatttccaatatagcagggggagtacaaccccctgtgatattgttcgtaatatctagggggagagaaaattatattagtcttaatatctcaggggacgttcatccccctgtaatattgttggtaatattcagaatggagaagatgatattgttcttaaaatacaggaaaaaatatgataatattacttccaatatcgaagggggtgtacactctcctgtgatattgttcccaatatccagaatgaaagaggatgctattactcccaatatcccagggagtgtacacccctttgccatattgttcataatatccaggggaagacaggataacattactcccaatatcaccgggggtgtccacccactagtgatatttattgttcatcatatccagaaaaggagaggatgatattactcccaatattgcaggtggtgtacggtccctgtgatattctttgaaatatctagaaaaggagaggatgatatcactccgagtatcacagggggtgtacacccccctgtgatattgttcgtaatatccaggggagaaaaggatgatataattgccaatatttcaggggatgtgcacctccctgtgatattgtttgtaatatccaggggtggagaggatgatattactcaaaataacgtaaacatcctgtgtgtacatcccctgtgatattgtttataatatccaggggggtagaagatgacattacccccaatatcacagagtgtacacacccctgggatactgttcataatatccaggcgggaaagaatgaactacttccaatatcgcaggatatgtacacccccctgtgatatatttcctaatatttatgtgggtaaggatattacccccaatatcacagaaggtgtacatcctctttgtgatattattcctaacatccaggaaaggagagaatgatattactcccagtatcgcagggggtgtacaccacccctgtgatattgttgctaatatccagggggagaggataatattactcccaaaatcacaggggacgtacactcctcctgagatattgttcctaatattcatggggaaaagaatgctactactccaaatacagcagagggtgtacaccatccccgtgatattgttttttatatccaaagggtgaaaggctgatattactcccaatatcgcagggggtgtacaggccccccatgatatcattcttaatatccagggaggcaaagaatgatgttactcccaatattgcaggctgtatacaccccccgtgatattgttcctaatatccagagtaagagaggatgacattgctcccaatattgcaggggttgcacgcacgccctgtgataatattactcccaatatcaacagtgggtgtacactcctcctgtgatattgtttgttatatctaagaaagaagaggatgatattactgtcaatatcacagaaggtgtacagccccttgtgatgttgtttctaatatccagcggtgagaggatggtattactcgcaatattgtagggggtgtccaacggccctgtgatattgtttctcatattcaaaaaggaaaagaataatataactccaaatatcgcagggtgtgtacacttccctgtgatattgatcctaatatccaggaagagagaggatgatattaatcccaatatcacagggggtgtacatcgcttctgtgatattcttcctaatatccagggggggaggggatgctattactcttaaaatcgcagggaacttacactcccactatgatatttttcctaatatccaggaagggagaaaatgatattactcctaatatcacatatcacaatgggtgtacatctccccgtgatattgtttctaatatcaaggatgggagaaaattatattactctcaatatcgcagggggtgtgcacacctcctgtgatattgttcctagtatccagcggaggagatgatattactttaaatattgtagaaggtgtacaacccccctttgatattgttcctaatatccagggggaaaggagatgatattactcctaatatcgcaggggctgtacaaccctatgtgatattgtttcttctaatatccaggggtggagaagataatattactcctaaaatcgaaggggacatacactccccctgtgatatttttcctaatatccagaaggaaagaggatgatattactcctaatattacaagaaatgtatacctgtcctgtgatattgttcctaatatccagaggggtaaatgattatattactcccaatatcgcaggggtgtacaccttccctgagatattgtttctaatatgcagtggaggagaggatggtattactcccaacatcacaggagatgtaaactccccttgtgatattcttcctaatgttcaggacgaaggagggtaatattactcactgtattgcagcagggggtgtagagccccctgtgatattgtttttaatattcaaggttggagaaaataatattccttccaatatcgcatggggtgtacacccttctttttatatagtttctaatatctggggggagaggatgatattactcccaatatcgcagggggattacacccccactgtgatattgtttttaatatccagggtgggagaggataatattactccaaatatcccagggctatacaccctccgtgtgatattgtttctaatatccagaggaagagaagatgatattactcccaatgtcacagggtgtgtacaggccttctttgatattgttcttaatatccatgagggagaggatgatattactcccaatatcgcaaagactgtacaccctttctgtgatattgcttccaatatccagggagggagaggatattacactcaggatcacagggggtgtacaccccaacctgtgatattgtttctaatatctagggaaaatgagggtgatattactatcaatatcacaggaggtgtacactcccttatgatattgttcctaatatccaggagaatgacaggataatattactcccaatatcgcgggtggtgtctccccccactccgtgatattgttcctaatacccagagggggagagaatcatattactcccaatatcgcaggggatgtacacctacatccggcggagtagaagataatattactcacaatatcgcaagaagtgttcaccttccctgttatattgttgctaatatccagggagtgagaagatgatattactttcaatactgagcgtgtacactacccctgtgatattgtttctcatatccagtagaggagaaaatcatgttactcccaatattgcaggggtgaacacctcctttgtgatatttttcctaatatcaggaaagggagagtatgatattacccttaatattgacaggggtgtacacccccctttgatattgttccaatatccaggggggcagaggataatattattcccaatatcgcagagggtgtacaccccccgtgatattgttcctaatatccagagaaataaaaaatagtattatttccaatatcacagggcgtacattttccctgtaattttgttcctaatatctggggggtggggtggcaggataatattactctcaatattggagagggtgtacacccccctgtgatattgttcctaatattcagggtgggagagaatgatgttactcccaatatctcaggagtcgtatacacccccttgtgatattttttctaatatccaggaggcagaggatgatattgctcccaatatcgcagggggtatacacccgagctgtgatattgtttctaatatgcaatatgggggaaggatgattttactttcaatatcgcagggaatgtacactttccttgtgattttgttcctaatatccaggggtggagaagatgctattactatattactcctcatatcgcaggcggtgtacaactccctgtgatatggttcagaatatccagagtgaaaaaggagggtgacattactcccaatatcgggggggtgtacacccctttgtgatgtggttggtaatatccaggggggcagatgagggtgatatcactccccatatcgtggaaggcgtccacttttttgtgatgtggttctttatatcccgaggggagaaggtgatattactccccatatcgcgaagggcatacacccccctgtgatatagctcataatattccggagagtggaggaagatactatgccctatatcgcgggtggcctacaaccccctatggtttggcttataatatccaggggggagagggtaatattgctccccatattgtggagacgtacagccccctgtgatatggtttgtaatatctttggggggcgagggtgatattactccccatatcgcggggagcatacacccccgtgatctggttcatagtatctcaaaggaagaagttgatgtgtacaacttaagggaaaaagttgaagtgaagtgtacacacgccctgtgacgtggttcataatatccaggcgggggagaggagagtgatatttactccccatatcgcgggtgttgtaaactcccctgtgatatagttcataatatccaggggagagaggagggtgatattgctcctcatatcgcgaagggtgtacaaccccctgtgatatggttcataatatccagaagggtagaggacgatgatattactccacatatcttgggaggtgtgatatggttcgtaatatccagcgatgagagaatgatattactccccatatcgcaaaaggtgtgatagggtttgtaatatcctgagggggagagggtgatattaatccctatattgcagaaggactacaccctcccatgacatggtttgtaatatcccagggggtagagtgtgatattactttccatatcacagggggtgtgatatgattcgtaatattcgaagggggagagggtgacactactctccatatcacggggtgtgtgatatggttcttaatatcccaggggttagaggttgatattaccccctttttggggggtgtgtacaccccctgtgatatggttcgtaatatcccgggggagacagggtgacattattccccatatcgaggggatcgtacaccccctgtggtgtggttcataatatccctagggggagatggtgatattactccccatatcagggggcgtgcactcttctgtggtataattagtaatatccagggggcagaggtcgatattcgtttccatatcatgaagggagtacacttccctgtgatatggttcctaatatccaggggggagagggtgatattattccccatattgcggggggacatacaacccctgtgatatggttcataataaccagaaaagaagagggtgatattaatccccgtattgcagagggcatacaccccccctgtgatatggtttgtaatatctaggggaggaaaaggtgatattactttccatattgctgggtgcagacacccctttatgatatggttcataatatccaagttggagagggtgatattacttcccatatcatgggaggtatacccttccctgtgatatggttcgtaatatccagaaggggagagattgatattactccccatattgtggggggcgtacaccttcctgtgatacggtttgtaatatctaggggatatagtgggtgatattactcaccatatcacgggggttgtaacatggtttgtaatatccaggggaggagagggtaatgttactccccatatctcggggcatgtacaccctcctgtgacatggttcgtaatatccaggtcgggagagggtgatattactcctcatattgccgggggtgtgttatggttcataatatcctggggaaggaggctgctatcactctccacatcttgggggatgtacactctcctgtgatatggttcataatatccagggtgggtgagggtaatattactccccatatcgcgggaagtgtacatacccctgtaatattgtttgtaatagaagagagggtgatattactccccacatcgcgggtggtgcccacccccctgtgatatggtttggaatatccagggggatgaggagggtgatattactccccatatctcggtgggagtacatccctctttgatcaagttcataatatccaaaaggaaacaggagagtgatattactccccatatcgccgggggtgtacacgggagggggagtacacccccggcgatatggtctgtaatatccagggaaggagaggagggtgatattactcaccatatcgcaggtggtctacatttacctgtgaaacagtttgtaatatccagggggggaaatgagaatgattttttttttttgagtctcactgtgtcacccaggttggagtgcagtggcacgatcttggctcactgcaacccccgcctcctggactcaagcaattctcctctcccagcctcctgaatagctgggactacaggcgcaccccacaacgtctggctaatttttgtatttttattagagacggggtttcaccatattggccaggctgatctcgaactcctgaccctgtgatccatccgcctcggcctccaaaagtgctgagattacagatgtgagccaccacgcatggcccaaggagaacgatattactccccatatcccagggggtgtatatccccctgtgatatggttcagaatatccggaaggaaagacagggatattacttcccatatcgcaaggggtgtgacatggttcgtaatatcccatgggggagagggtaatattactcttcgtattgtgaagggcatacactcccctgtgatacagttcataatattccggggagtagaggaagatattatgctccatatcgcgggtggcataagccccctgtggtttggttcataatatccagggaggagagggtaatattactccccatattgtggggacgtacaccctcctgtgatatggtttgtaatatcccagaggggagagagtgatattactccccatattgcagggacatacacccccctgtgatatggttcaaaatgtcttttttttttgaaggactggttctttatttcaaaaagacacttgtcaatattcattatcaaaacagttgcactattgatttctctttctcccaatcggccccaagtagaccacatcaaaggagagtacatattaagccaataagctgtaggatgtacacctaacagacctcctagaaaccttaccagaaaatggggacagggtagggaaagaaactttaaaagatcaacaaactgccagcccacggactgcaggggctgtcacagccagatggggtggccagggtgccacaaacccaaagaagcaaagtttcaaaataatataaaatttaaaaagttttgtacataagctattcaagatttctccagcactgactgatacaaagcacaatgagatggcacttgtagagacagcagcttcaaactcagaaaagggtaatgagatgagtttcacatggctaaatcagtggcaaaaacacaatcttctttctttctttctttctttcaaggaggcaagaaaagcaattaagtgctcacctcaacataaggggaacatgatccattctgtaagcagttgggagggggtagagatggaacaaaattttggtctcagaggtcttgccatcttaatttggtcacttctaatgaaaaaaataaaaaatagaaataacattatccaaaggtatcttaaagctgaaaacttgaacagcacattttttgttgttgttgtttggctaactcctcctggaaccacctttctggcttagctagtactttgtacagagcaatgaggcttcccatagtggagtctccctgggctctgtttggctctcagcaaggcaggcctataccttttcctctcctccatggagagaggaatatgcattaaggtgaaaaatcaccttccaaaagtgagaaagggattcgatcgctgcttcagggctgtggtattatatggaatgttttacaaaaggttgctacaaaacaacaaaagaggtaattacaaaatgtgtacatcacaacatactttttaaagacattatgcattgtgctcacattcccttaaatgttgtttccaaaggtgctcagcctctagcccagctggaatctccgggaagaggcggacagtttggtgaaaaagacacagggaaggagcgggcggcggaaggagggggcggcgaaaggagaaagcagccttccagttaaagatcagccctcaattaaaggtcagcttcgggcaggctggcctcaggcggagtctggttcagagggaggagcagcagcagggtgagactgaggcgttctacatctcattcaggtcaagcagagtctggtccagcatcctttgtgtacagaggtgctcccctttggtgcatttcagtttatcttccaagtcatcaattgtcttttccagcttggctaccgatctctcagcaaactcagcatgggtctccgcctcctttattttatcagtaagaatcttgatctcttcctcatatttgtcttctttttgagagtacttttcttcagcagcactcagacacttcaggttctggtccatcagtctaatctgctcatccatctctcggcaaagggattctgccagctcagctcgttcctctgtgcgttccaagtctccttcaatgatcaccaacttacgagccacctcttcatacttcctatctgcctcttctgcaatgtgcttagcttctctgagttggatttcctggagttccatcttttcttcatcttttaaggcccggttttcaataaccttcttacctctctcactctcatcagcagctttttccgcttcttccagcttttgcagggcagtagccaggtgctcctgagcacggtccagctcctcttcaaccagctggatcccacgttcaaggaggccacctcagcctcagcctgttcccgggcccacctttctccctcaacttctcgctggaggcgctcagctcgctcctctgcatcatctgcctgctgctgcagaacctggatcttgcgcttcaccgcctcgatggtggtgatcccagccatggtgcccacccagctactgctagagctccggttcctgcctcctccgatcggcgttgcagcctcctctcacccttacttccgcctcggttcaaaatatcttaagggaaggagttgatattactccccacatcacgggaagtttacatcccctggtgatatggtttgtaatatcccagggtggatagggtgatattactctccatatcgcgaaggagtactcccccctgtgatatggttcataatatccttggggggagagtgtgatattactccccatatcgcgagggccatatactcctttgtgacatggttcgaaatatcccggtgggggagggggtagagggtaatattactccccatacagcgaagagcatacgcccttctgtggcaaggttagtaatacttcagggaaaagagtgcaatattacttttcatattgcagggaacatacactcccctgtgacatggttcgtaatatcccgggggctgagagggtgatatttctccccatatcaccgggggcctacacctgggtgtgatatggctcataatatacagggagggagagggtgatattactccacataccgagtgaggggttacacaccctcgtgacatgttcgaaataccccaaggaggagacaatgatattactttccctgtcgcgggggctacaccctcccagtgatatggttcacaatatcccggggtggagagggtgatattactccctatatcaccggggggtgtacacttccctgggaaatggtttacagtatccccggggggagagggtactattactccccatatcacgttacatatcagggtacacccccacgtgatatggtttgtaacatcccaggaggaagaaaatgatattactccccatatcgcggtggcatacacccctccccgttaaatggttcataatatcttggggtggagagggtgatattactccccatatcacgtggggcatacaccccactatgatatggttcataatatcccggaggggagagggagatattactctccatgtcgcggggggcatatacacccctgtgatatggtttgtgatatcccgggggcggagagggagatattactctccatatcgtggggtcgtacacttttctgtgatatgattcgtaatatccagacggggagagggtgatattacttcccatattgcgggggcgtacacccctctgtgatatggttcataatatcccgaagaaaagagggtgatattactcctcatatcgcggggaacacacaccaccctgtgatatggtttgtaatattcagcgggggagagagtaatattactccctgtatctcggatggcgtacactcccctgtgatatggttcataatatccagaagaaaagagggtgatattactccccatattccagggaatgtacaccaccctttgaatatggttcgtaatatccaggaggggagagggtaatattgctcccaatatcgaaggaggtgttatacggttagtaatatccagagaaggagagggtgacattactccccacatcgtggtgggtgtgcacccacctgtgatatggttcataatattcaggttaagagaggtgatattgctttccatatcgccaagggtgtacactcccgtgaaatacagttcgtaatatccaaaaggggagagggtgatattactcccatatcgtggggggtgtacacccctctgtgatatggttcataatatccagggtggaataaggtggtattactccctgtatctcggggcatgtacatcgcctgtgatatgattcataatatccagaagaagagagggtgatattaatctccatattgctgggggtgtacaaccccctgttgtatggtttgttacactgagttggggagagggttacattactctcaatatcgagtggggcatacacacttatgtgatatggttcataatatcccagggaggagagggtgatattactccccatatcgcgggaggcatacaccccaatgtgatatggtttgtaatatctacatttttttttttgagacgaagtctcgctcttgtcccccaggctggagtatgatggccggatctcggctcactgcaacctcagcctcccgggttcaagcgattctcctgccttggtcccccaagaagttgggattacaggcgcacaccaccacgcccggctactttttgtatttttagtagagaaggggtttcaccatgttggccaggctggtctagaactcctgacctcagatgatccacctgcctcggcctcccaaagtgctgggattacaggcgtgagccactgcacctggcctggtttgtaatatctatgaagggggaaggtgatattactttccatatcacgggaggcgtacaccacgatgtgatatggtttgtaatatccagggggtatactgggtgatattactccccatatcgcggggagtgtatacccttttgtgatatggttcctaatattaagctgaggagaaggtaatattactccccatatcgcaggggtttttatatggttcataatattcaggaagagagagggtgacattactctccatatcacggggtgtgtactcccccatgtgatatggtttgtaatatccagggaaggagaggttaatattactccccatatcgcagggggtgtacacctctctgtggtttgtaatatccaaagggaagaggatgatattatcttcaatatcttggggggatacagtccccagtgatattgttcataatatccagagggggaggggatgatattactcccaatattgcaggtggtgtacaaccccctgtgatattctttataatatagagggggatgatgatattactcccaatatagtaaacaacctgtgtgtacaccccctgtgatattgtttataatatccaagggtggaaaggatgatattactcctcatatcgcagggggtgtatacccctctgtgacattgttcctaatattcaggggaggagaagatgatactactcctcatatcacaggggatgtacacccccctgtgatacttttggtaatatccaggggaggagaaaattatattattccccatgtcacagagggtgtacaccccgctgtgatagtgttcataatatccaggtgaaaagaggatgatattactccgaatatctcaggaagtgtacacccttctgtgatattgttcataatatccaaaggtggagaggaggatactactccccatatcgcagtgggtgtacacccccctgtgatatggttcataatatccaatgtaggagaggatgatattactttccatatcgcggagagtgtacatccccctgttatattgtttgtaatattcagggagaaagaggatactactactccccatatcacacggggtgtatattcccctgtgatatggttcctgatatccaagagatattataatcctctcttggattatgctacctctcatatcgcatggggtgtacacacactttgtgatatcgtttgtcatatccaaggagggagaggattatattaatcccaagatcacggggggtgtacaccctcctgtgatattgtttgtaatattaaggggggagaggataatattactcccaatataattaacaccctgtgtgtactcctccttgtaatattgttcataatatccaatgggggagacgatgatattactttcaatatcgcagaggatgtacatccctttgtaacaatgtttgtaatataaaaggcaagagaggatgatactacttccaaaattgcaggacatgtacaccccccggtgatattgttcctaatatccagtggggaagaggatgatagtagtcccaatatcgcaaagggtgtacacaccccctgggatattgttcctaatataaaaggaggagaggatgctattattcccaatatcacagaaggtgtaaaatcccctgtgatattgttcgtaatattcaggaggggagaggattatattactcccaatatcacagggtgtgtacacagggaggggcaagggccagaagcgggcgggaatccccatgtttgggcggacccagtttctaatggccagcatttgccaatcaaagcttaccagagaactctaaaagccagggctttcctgctagacaagactcatttctggaactgctttaaaaagaaacaaaacttcccaaggaccccttttcctctctgtctgcctaaaataatgttttaaaaactcctaaagcagctgaattcagcccccttcctgggggaatgtatagacggaactcccacctttcccggcatcccaaggccagagtatgtgaaactcctgggtctctatgtgtgtctgagcggctgctctgccaacactccacacagccctgtgtcctggacccaaggcccttatgacctgagctcaagaggggatctcctgatccatgggttgcaaagatccatgggagaagcatggtttctggggcggggtcacacgctcagtcactgtttccctcggatgccggagatggttcctttggctctctgccaatacagggtgaatcatcatccatccctcttttctttgttctcccgggtcaagttgtttgcctagtcagtcccaatgtgagaacctgaatatttcagttgacgcgctgacttcaaaatccccgggcttcgggaggcggagcttgcagtgagccgagatcccgccactgcactccagcctgggcgacagagcgagactccgtctcaaaaaaaaaaaaaaaaaaaaaaaaaaaaaagtccccgggcttttcttttcactcagtggaaggcagctgcttctaattggccatcttggcccgcccccaccacgtgaccttctgtaaaatgcctccactctccaggaacgctctcattatataactttgcctgaaaccaacagcacgctcattgcacatatcatgggctcatttatttcacttataaagaacctggccaaggaagagatagtgcctaaagtggccagtattctgaccgatatgttagaaaaatggtgtgccgaccaattcatgacatgtgtcccaaaactagcaacggaaattgtattcgccgtgttgaggtctctaatccagatgatgctcatctatgtactggaaaaggcagagtcctttcctgacaagctgctgaaactcttcagaaacatctcatatttcctgaagaagatgatgtctggacaagcagcacaggtcgttcagatttaactttctattcatatatccagcacgatattcgcacaattgtcacgaaaccttaccagttgatgagtcctgcacatttcctttaatttcaggaggaagagggtaatccggatgagttttctgacctactctgctgctgtgattaaacaaccaccaggaaattttgacgacactgttctcctgagctcctccctttcctccgggaacaaaacaattgaatttacaaaaataaagtgttatttgactggagtgaggtctcatgtctgcttatgcggtggctcgctgctcagaacagggtgagtctctgggttgtgtgctgaggaggggaggctctcaatctggagaaaacccactgcaggggacacctccatggggtctgagggactgaggatgaggagccggactgggtctagggaaggaggaggtttcagagggtgaaattctggcactaaagcctgggggtgtttgggaacttcctccttccgaagaagtttcagggagggataaagacaaaccctgggctccttgaggggcccttactaatttgagaggactctatcgggaaggagagtgacaatggcctccttgaggactgaggcccctgaataaatgaggcccagatacagtccatgggggatgagaccttcaagggtcacattttggttgggacagaggaaaagtgcagctctgcagccgcagaggaaaacccggcagtgtgaaagcgaccttggaggggccctgtgcgctctgaatgcgtctgagcccccatcccctgtccccgcctctctttctggattcttccagctcggctgtctccgccatcttctgagcgctccaccctgacttattcaagtttcccttctgccttccaagtactccaaaatctttcagatctgtgtccctacccctgtttttagcatgtgttggggctccaggtccctgaaggtttctggcctgaaatccacctccccagcggagtggactgcgttctagagactccacactccgcgaggttcccaggcccctgagggacaaccgagtggcctgcgcacttcagggctccacactcggcaaggtctttcaagcccttggggtccccttcttagttttttccacctttctgggctgcagtcactccataaatgctgggatctgatccccacccccactctcgtttcctcaattctgcgggctacacgctctggcaaggtcctccgggccctggatcccctccctctccctatgcccacgctcctagtcagcccttctggggtccactattttcaggaactaaccgttctcatggagccttgctaaccggaaagctgtgtggaagaaaggctttgaggatagaggtggagatttggctcttccatagtgccactcacccaccccaccatgctgccactgccagacccggacccctgtttcagaacaagtgaccagattcgctcctggacagccctggacactggccttttctctgaaaactactcaccctttctctagtccccacttcatgccagcctcataccctcttccttcccccacgctggcttccgggatcctcctctgctcagacaacctcttctgtgtcccacccccgtttttagaatgctttggggcaccaggttgggggaaggtttctggcctgatatccatctctttccaaactcccttcttcccttgaaaggcttcttgccttcagccccacttctggctccgaggtttcaggacaccctcctcttcatcctcattcttttgaccaccagctttttaggaattcgaacgtccctctcatcttcgtgaatcctgtccaggcatttgttgaccccttcatctgatacccctgacctcacattgccaaaagtctacccctacccagtacactggaattagacaaaatcccaggagttttacctcaactctgagtgtgcccacaggagctctccctgaagccacgtccttttaagcagggtctagggttcctcccttgtcttaatgaactctttgtcacacggaggacgttatggagcccttatgatctttcactgcctttctgcccagcgttttgtctttccatggacatttataatattttccatggacattttgttctctcaatgtccacccctaatttccaacatcccaaagattctcatgtgtttcctgaaagccatttacaggaatggctgtgcccagacccccttccccaggatcctccttcacacctggtaggtgcctctcctagagagatttgcactcagttgtcgtgcagtcacatggcccagatggttgttaatcacccccttcctggcaacagctagcagccagggaatcactggcacagaaacctcagggtgaccaagatgaggccacctctgtgctgaaggctgtgctccagagcctgcttgggatcaggcttaagcaggtcttcagccagacctgatgttacctggtttccttgagctgccctgcctgagctatcgggagcactccctcaatgcacatcttgattccctatctcatgctctgcttctagaaaccatgagctatcaattgctactggcaatggtcctgggaagtcaaccctaagtatggattctggggttggatgactccccacaggacttcagtgagcaacaatcactgctggcagttggaggacagagtcgctagggcatgtgaccactgtgaaaccaccgatgtttcacctggggtaattttggatgaactacggtagaagcactgaaggtacattgcttttggtttggaagattgtaggtaaataatagcgatatgaatgtggaattggatggctgcaaacgagtgccattgatgcattgaaagaggaaaagtcaggctgtcacctgtcactcagcaatttaaagtgtgagagttgggactagatgtggtggctcacatctataatccagagattcgggggaagcttgaagaggtaggatcttttgagtccaggagttccagaccagcctggacaccagagcaagacctcatctctacaacaaaattttcttaaaaattagatgggcttggtggcacgcacctgtacttgtagatctagctaatggggagcatgagataaaaaaatcacctgagtcagggacttaggggttacaatgaggtatgattgtgccagtgcacacactcccacctggccaacagagtgagattctgcttccaaaaaaataagaaataaatcaggtttgagagttggaaagcatcatcttctcctagagccaaaggacatgtacaactgagacccaggaacaaagcttcatcacaaagagaccatcatcagtggagccgggagatgcattccccctcaccctgccttgaggaggcagtggagtcatctgtctgggatcctttctgacccagccctatttgtttgtctctttggcttctttggatttgtatattttagctgttataacactgtaaaacaaacagagtgatttttttgagttgtgtgaatgatgctagctccatagtcaccctgagagtgatgggaacttttgaatttgtggcaagttggagggtagtgtaagtgacctgagattgccaaattggggctagcactggatgtgaggttaggctagtggaaaaatatgcccagaaccagaggagtgtgggctcactgcaggtggttaggctcagatccaaattgtacagatggatagctttggggtaaagaataacatagttgagaagtgcatgtgttagtctgttcatgcactgctataaagaattacctgagactgggtaattatttataaaactcaggtttaattgggtcatggttccacaggctgtacaaaaagtatgatgctggccatcagctcaacttctggggaggccccagaatagttagagtcatggcaaaaagtacaagggaagcaggctcatcttccacggccagagctggagcaagtggtaggagaggtgatacacactttcaaacaagtaggtcttttgagaactccatcaccggacagcacctatgggatggtgctaaattattcatgaaatatccgcctccataatccactcaactgtcaccagcgcagccagccccacctccaacagtggggattacaattccatatgaggtgtgggtggggacacagctccaacctcaatcagtgggcatcctggattgggtctactatagaaggagaaccaggagctgactatgatcttgaaccctacccatgatggccgggcggggtgactcatgcctgtaaccccagcactttgggaggctgaggtgggtggatcgcctgaagtcaggagttagagaccagcctggccaacatggtgaaaacctgtctctactaaaaatacaaaaaattagaccggcgttgtgctggatgcctgtaatcacaccactacgctccagcatgggaaaaaataccaaaacttcgtctcaaaaaaaaaaaaaaaaaaaaaaaaaaaaagactgcccatgaccactgcaccagtgagagggacaccagcatcactgagatgcaagggctggacattcttcataggtcagagctcaaagcaggggacactgatacagagatgggctccatccatagcaccaaagtggtgagaggatgtgggaatggcagaggccagcactttgccatcaatgcaagggggtataaggaggtgacaccagtgccagagtacatcacggggggactgccctacaatatctaggacttacctcttagagcgtgtttcattagcgacaacagatataaatggcagacaggtgtgtccctgcattaacaggaaatagaaatcatcaagaggaacagaaggcagatgtcagcagccccttagaaagtcatcatccttcatacagttaaaatctgagacagttctcacacgagaaggcctaactcaaaaagaggctgggttctcatgaggcaggtttatgcaaaaccaaggaaggtgtacaagtttggaattctccagtttcccttggaaaagacctacagtcatttgcttaggtaactgagcactgaacaaaggtgagtattgttgtcttttagaagctcttggccaagaaggccttgttggcataaaacccatggtttggaaacatcaccatgacccctgttagagtaatggcctaagggtgggggtcaggaaattgatgtattccttgccaacttctgcctctaagtgagtgaactctgtttgtgaacctctctcctctgtggttatgttcctaggctctcatgtataatcaggagtcatagacttagaaacaggaaaaatacttacagtgtttttgtggcctgtgagctatgacttataattttaggaaaaaaacaattgcaaatggaaagcctaagtctatcaatgctcatccaagacaacataatcaataaaaaccaatatcaaatctcaaggcaaattatttcctgtatatagatggcagagatgagcaccaccatcaaaaactcaaggaccagtgctgtgggtccagtcatctgtttcatggaattcaccagtctggtatcttcaaaatccagaaggatgatggcagatggcaggaaagtaatgcaaacgtcatcaggtgtgaccccactgtagcagctgtgatggatgttttctctcaccatagcaataaataacacaacctcggtcacactgtatgcattgttggtctgcaaaatccatgttttgcaaaactcttcaggaaggtggatctgtaatattggcattgacatgagaacaacagcagtatttattcacaatctcaagctctctgtcttcccgtctctctcattagccatccaagtagtcctgaggaaccaagcccatcagaacattctgcaacataatacacagctccattctccattcaaattttgttgttgttgttgttgttgatgagacaacatcttactccatcagccaggctgacgtacagtggggctatctgggctgactgtagtcttgagcttccaggctcaaggcatcctctcacctcagcctcctaagtggcttgaactacagacacacagcgacatgctgggctagtttttgtatattttgtagagacgtgctctcaccatgttattcaggctggactcaaactcctgagcgtaagtgatccaagcaccttggcctcaaagtgctgagattacaagcctgagccactgcacccagcccaatctccattctactgataacaatgtcattaccaggtctgatggacaggaaatggtaaggtttctgaaaacctaaggatcacacagcgagttccaaaggctgaaagtgcatacctgtcgacactgataccaatgacatccaatggtgagaatgacattccttgtagtcctagctctgctcataacaaatctatactgaagtgtaagagtttgatggtcatggggattttccatgtctctgcctttcagcgatgtgccatatctgtgaagtgttcagaaatgcaacagcctgaggcatgctgggcatatcctctaataaaaaggaaaatgccattttatggtcctgtatttctacaagttggaacacatgggcctgtgatccagatgggggaaatgggaatattcccactcattcaccttcatccacgaagcccatttgaaagctttgggcttcccatccttgtagattttagtgttgtgggctgggtgcagtggctttcacctgtactgccaacactttgggaggcctagacaggtgaatccactgaggccaaaagttcgagaccagcctggccaagatggtgaaaccccgtccctactaaaaatacaaaaattagcaaggtattggggccagcacctgtaatcccagctgctcgggaggctgaggctggagaatcgcttgaacccaaaaggcagagactgcagtgacccgatcctgcctttgcactccacctgggcaagcagaacaaaacttctgtcttgaaaaaaaaaacaaaaaacgaacaaaaaagatgttagagttctgggtttagaggtctataccccagaaagagaatggtttcaacaagggacaaagaagttgctttaaacgttgacttgccatttcttttcagtgtgtttgttctcttgcgtcaagagaccaccagaaaagtggtgcaattactctcctgtcaagaatcattgactatcatctgcaagagggtcagatcctggtatataattagggcagaaatacttagtctgagaagggtatgacatccagaggccctattaatgatgtccttttctccatgcctgactctgaccccatgtgctggactgcccctgtgtggatggcctcatggcctgctcggactctgaggtcccaccccaagtggcacctccatggagggctctactcttgtatgggctctgacactcacactgagacactctcccatggacacctcttcacccacttggggtctgaaactgggctactccatccctccctaacctggaacagagagctttcactgctattacacaagtcatagaggctaactcctcatttttccaagctaattattgaaacattagtcctgggttgataagacaagataagttaacttttcataaatttgcttatcaagttttgaataaattcaaataaattcaccttccccacacaccttagttgtcgacatcacacgcgcacccatactcacagggtgagcacgaaggcttcactgtcagtggagaaagtggcaaaacccttctgtgcctcatcctggtctagacctggccctcatcctttcccactcttcccctcactcccttggattcatccacactggcctcctgcctgctgctccacctccctgcgaagctcacccctgcctcagggcctttgcacgtgcagtggcttcaagccatatcctcttcacccagatctcccagatctcctgaatgatcttcttttatcattcaggtctcagcttgcatgtaatcttctcagtgaggattacccaaaccacatagttcattcattcattcaaatattcattcaatggcatattgacaaagcagctacttcatgccaggccttgggccaggtgttatggatatggcaacaaacaaaacaagagttttctgctctcaaatttttacccacttaaaggagatatcatacatcatctgtaaataaatacatcatctgtaaataatgatgtaaataaatacatcatctgtaaatctgtaaataatgatgtaaataaatacatcatctgtaaataaataaagtataataaaagaaaatagtaggtttttttggttggaggtgaccgtgaagtttgcaaataccatcttacaacacattattttattttatttcatttcatttttaattttattattattatactttaagttttagggtacatgtgcacaacgtgcagatttgttacatatgtatacatgtgtgaagttggtgtgctgcacccattaactcgtcatttagcattaggtatatctcctaatgctatccttcccccctcccccaccccacaacagtccccggtgtgtgatgttccccttcctgtgtccatgtgttctcattgttcagttcccccctatgagtgagaacatgcggtatttggttttttgtccttgtgatagtttgctgagaatgatggtttccagcttcatccatgtccctacaaaggacacgaactcatcattttttatggctgcatagtattccatggtgtatatgtgccacattttcttcatccagtctatcattgttggatatttgggttggttccaagtctttgctattgtgaagagtgccgcaataaacatacgtgtgcgtgtgtctttatagcagcatgatttataatcctttgggtatatacccagtaatgggatggctgggtcaaatggtatttctagctctagatcactgaggaatcgccacactgacttccacagtggttgaactagtttacagtcccaccaacagtgtaaaagtgttcctatttctccacatcctctccagcacctgttgtttcctgactttttaatgatcgccattctaactggtgtgagatggtatctcactgtggctttgatttgcatttctctgatggccagtgatgatgagcatttcttcatgtgttttttggctgcataaatgtcttcttttgagaaatgtctgttcatatccttcacccactttttgatggggttgtttgtttttttcttgtaaatttgtttgagttcattgtagattctggatattagccctttgtcagatgagtaggttgtgaaaattttctcccattctgcaggttacctgttcactctgatggtagtttcttttgctgtgcagaagctctttagtttaattagatcccatttgtcaattttggcttttgttgccattgcttttggtgttttagacatgaagtccttgcccgtgcctatgacctgaatggaaatgcctgggttttcttctagggtttttatggtttgaggtctaacatgtaagtctttaatccatcttgaattaatttttgtataaggtgtaaggaagggatccagtttcacctttctacatatggctagcctgttttcccagaaccatttattaaatagggaatcctttccccacttcttgtttttgtcaggtgtgtcaaagatcagatagttgtagatatgtgacattatttctgaggactctgttctgttgcattggtctatatctctgttttggtaccagtaccatgctgttttggttactgtagccttgtagtatagtttgaagtcaggtagcatgatgcctccagctttgctcttttggcttaggattgactttgcaatgcggggtcttttttggttccatgtgaactttaaagtagttttttccaattctgtgaagaaagtcattggtagcttgatggggatggcattgaatctataaattaccttgggcagtatggccattttcacgatattgattcttcctacccatgagcatggaatgttcttccatttgtttgtatcctcttttatttcattgagcagtggttttagttctccttgaagaggtccttcacatcccttgtaagttgggttcctaggtattttattccctttgaagcaattgtgaatgggagttcactcatgatttggctctctgtttgtctgttattggtgtataagaatgcttgtgatttttgtacattgattttgtatcctgagactttgctgaagttgcttatcagcttaaggagattttgggctgagacaatgggttttctagatatacaatcatgtcgtctgcaaacagggacaatttgacttcctcttttcctaattgaataccctttatttccttctcctgcctaattgccctggccagaacttccaacactatgttgaataggagtggtgagagagggcatccctgtcttgtgccagttttcaaagggaatgcttccagtttttgcccattcagtatgatattggctgtgggtttgtcatagatagctcttattattttgagatatgtcccatcaatacctaattattgagagttttcagcatgaagggttgttgaattttgtcaaaggccttttctgcatctattgagataatcatgtggtttttgtctttgggtctgtttatatgctggattacatttattgatttgcatatattgaaccagccttgcatcccagggatgaagcccacttgatcatggtggataagctttttgatgtgctgctggattcggtttgccagtattttactgaggacttttgcatcaatgttcatcaaggatattggtctaaaattctcttttttggttgtgtctctgcctggctttggtatcaggatgatgctggcctcataaaatgagttagggaggattccctctttttctattgattggaatagtttcaggaggaatggtaccagttcctccttgtacctctggtagaattgggctgtgaatccatctggtcctggactgtttttggttggtaagctattgattattgccacaatttcagatcctgttattgctctattcagagattcaacttcttcctggtttagtcttgggaaggtgtatgtgtccaggaatttatccatttcttctagattttctagtttatttgcgtagaggtgtttgtagtattctctgatggtagtttgtatttctgtgggatcagtggtgatatcacctttatcattttttattgcatctatttgattcttctctctttttttctttattagtcttgctaccggtctatcaattttgttgatccttttaaaaaaccagctcctggattcattaattttttgaagggttttttgtgtctctatttccttcagttctgctctgattttagttatttcttgccttctgctagcttttgaatgtgtttgctcttgcttttctagttcttttaattgtgatgttagggtgtcaattttggatctttcctgctttctcttgtgggcatttagtgttataaatttccctctacacactgctttgaatgtgtcccagagattgtggtatgttgtgtcttttttctcgttggtttcaaagaacatctttatttctgccttcattttgttatgtacccagtagtcattcaggagcaggttgttcagtttccatgtagttgagcggttttgagtgagtttcttaatcctgagttctagtttgattgcactgtggtctgagagacagtttgttataatttctgttcttttacatttgctgaggagagctttacttccaagtatgtggtcaattttggaataggtgtggtgtgatgctgaaaaaaatgtatattctgttgatttggggtggagagttctgtagatgtctattaggtccgcttggtgcagagctgagttcaaatcctgggtatccttgttaactttctgtctcattgatctgtctaatgttgacagtggggtgttaaagtctcccattattattgtgtgggagtctaagtctctttgtaggtcactcaggacttgctttatgaatctgggtgctcctgtattgggtgcatatatatttaggatagttagctcttcttgttgaattgatccctttaccattatgtaatggccttttttgtctcttacgatatttgttggtttaaagcctgttttatcagagactaggattgcaacacctgcctttttttgttttccattttcttggtagatcttcctccatccctttattttgagcttatgtgtgtctctgcacgtgagatgggtttcctgaatacagcacactgatgggtcttgactctttatccaatttgccagtctgtgtcttttaattggagcatttagcccatttacatttaaggttaatattgttatgtgtgaatttgatcctgtcgttatgatgttagctggttattttgctcattggttgatgcggtttcttcctagccttgatggtctttacaatttggcatgtttttgcagtggctggtactgactgttcctttccatgtttagcgcttccttcaggagctcttttagggcaggtctggtggtgacaaaatccctcagcatttgcttgtctgtaaaggattttatttctccttcacttatgaagcttagtttggctggatatgaaattctgggttgaaaattcttttctttaagaatgttgaatattggcccccactgtcttctggcttctagagtttctgccaagagatcagccgttagtctgatgggcttccctttgtgggtaacccgacctttctctctggctgcccttaacattttttccttcatttcaactttggtgaatctgacaattatgtgtcttggagttgctcttcttgaggagtatctttgtggcattctctgtatttcctgaatttgaatgttggcctgccttgctaggttgcagaagttctcctgggtaatatcctgaagagtgttttccagcttggttccattctccccatcactttcaggtacactaatcaaacgtagatttaatcttttcacatagttccatatttcttggaggctttgtttgtttctttttactctctttcctctaaacttctcttctcacttcatttcattaatttgatcttcattcacttatatactttcttccacttcatcaaatcggctactgaaggtattgcatgcatcatgtagttctcatgccatggttttcagctctatcaggtcatttaaggtcttctgtacattgttttctctacttagccattcgtctaatcttttttcaaggtttttagcttccttgtgatgggtttgaacatcccctttagctcagagatgtttgttattactgaccttctgaagcctgcttctgtcaacttgtcaaagtcattctccatccagctttgttccattgctggtgaggagctgcgatcctttggaggagaagaggtgctctggtttatagaattttcagcttttctgctctggtttctccccatctttgtggttttatctacctttggtctttgataatggtgacctagagatggggttttggtgtggatgtcctttttgttgatgttgatgctgttcctttctgtttgttagttttccttcgaacagtcaggttcctcagctgcaggtctgttggagtttgccggaggtccactccagaccctgtttgcctgggtatcaccagcggaggctgcagaatagcaaatattgcacaacagcaaatattgctgcctgatccttcctctggaagcttcgtctcaaaggggtgcctggctgtatgaggtgtcagttggcccctactgggaggtgtctcccagttaggctagatgggggttagggacccacttgagaaggcagcctgtccattcacagagctcaaacactatgctaggagagccactgctctcttcagtgctgtcagatggggatgtttaagtctgcagaaatttctgctgccttttattcagctatgccctgcccctacagatggagtctacagaggcaggcaggcctcattgagctgcggtgggctcctcccagttcgagcttccagaccactttgtttacctactgaagcctcagaaatggtgaacacccctcccccacccagtctgccgccttgcagttccatctcagactgctgtgctagcagtgagcgaggctccatgggcgtgggacccactgagccaggcacaggatataatctcctggtgtgccatttgctaagaccattggaaaagcacagtattaaggtgggagtgtcccaattttcccagtacagtctgtcacgggttccctcatctaggaaaggtaaatcccctaaccccttgtgcttcccggtgacgcaatgccccaccctgcttcagctagccctccatgggctgcatccactgtccaaccagcccaatgagatgaacaaggtacctcagttggaaatgcagaaatcacccatcttctgtgtggatcaggctgggagctgcagaccggagttgctcctattcggccatcttggaatggcaatctatgtttgctttttacatttgaaaaaactggtgtcacgtacctaggtattaatcattgtggtatcctcttgccgatttacctctttatcattaactagtgaccctccttgtcttttgttgttacagtctgtgattttagtctattttatctaatatgagaatagctactctggcacttttttggtttccagcttcatgaaatatccttttccatttccctgttttcatttccctttcggtgtctctatagatgaagttgatttctttaaggcaccataagttgggtcttatttctttatccatttgaccatttagagaatttagaacactgtcagtgttattattcataagtaaaaacttaagagtgggtgtagtggtgtacatctgtatttcctgcactttgagagactgaggcgagctgatctcctggggtcaggagtttgagaccggcctggtcaacatgatgaaaccctgtctctactaaaaatacaaaaattagccaagcatgctggcatgtgcctgtaatccaatttacttgggaggctgaggcaggagaagcttgaacctgggagacaaatgttgcagtgagctgagatcacacagagaagtcatctccactctcctcatcagaacctcttgttcacagcatttgtgagcacaaatcaatgatggttattctttcctactaattagggatattttattacacagcaatagcctccagcaaagggaaccatcatacatgattcctacaagttgacagggctggaattatcactgaaaaactaaggtggctatacttgattcccaatgtccaatttttcatgaatagagaaatttatcctttttccccccagccagaaaccaagttttgctcttacgcccaggctggaatcaagtggcacaatctcagctcactgcaacctctgccccccagcttcaagaaattcaccttttgaacaaggagatattaaggatacactatgtgtatgctaccggtggttgcaggagactcagaaaagagagaaacagtcactggcctcgtgcaactgatattctcgggaggagagaaaggcaatcaagaaagaaacatgctgtatttcagacagctgtaagtcctccacaagaaaagaaagcaggtgaggaacataggaaatgtgtcaaccataaggttcccgctaattctataagttggtcagggatatcctccaagaataagcagcatctgagcaatcacctgaagggaggaaggaaggaagactgtgagtggtggcttacacctgtaatcccagcactttgggaggccaaggagggcagattgcctgagctcaggagttcacgaccactcagagcaacctgttgatacccaatctctactaaaaacacacaaaaaaattacccgggtgtggtggcacgcacctgtagtcccagcttccatgcccagctgatttctctctctccatatatatatatatatacacatatattgtttttgcagagatagggtctcactgtgtcacccagtcatcaagcaattctcttatactgttttggaaaagcatgggaattacaggtgtgaaataccctgctggtcctgaaaaatgtgatatttgggattctctgcctggcttgttttacccaaaataatgacctccagttccttccaggttgctgcaaaagacatgattttcactgttttataactgaatagtattcctgtatgtatacataccacattttctttatttattcttctgttgattgacatgtagggtgattccatgtctttgctactgtaaataatgctgcagcaaatatttgtgtgcattttgatctattcctttgagtaggtacccagtactgcaactgcaggactgagtagttgttatattttttgttctttcagaaatctccatagtgtttgccataaaatctgcactaatttacattcccaacaacaatgcataagatttccccttttctccacattctcactaacatttgttatgtttttgtctttttcataatacccattctgactggagtaagatatctcattgtggtggttgttgatatttttgagacggggtctcactctgttgccagactggagtgcagtggtgtgatcgtggcttgctgcaacctccacctcccgggttcaagcaattctcctgcctcagcctcccgagtagctgggactacaggcgcgtgccaacaggcctggctcattttttgtatttttagtaaagacagggtttcaccatgttggccaggatgatcacagtctcttgagctcatcatacacctgcctcagcctcccaaagtgttggaattacagtcatgaggcagcgcacccaacctcaatgtggttttaatgaccatttctctgacgattcatggtgtggagaatttctttgaaataccttttggccatttatatgtgctcttttaaaaactgactcctgtccaggtgcggttgagcatgcctgtaaccccagaacttcgggaggctgaggccaatggatcacttgaggcaaagaggcagaaatcagcctggccaacaaggcaaaaccccatctttactaaaaatacaaaaaatcagccacgggctgtgactcgtgcctgtggtgcaagttactcaggaggttaaggcacaggaattgcttgaacccggtaggcacaggtcacagtgagccaagatcatggcactgcactacagcatgggtaatagagaaagacctgtctcataaaaacaaatgaataaataaataagataaaaaataaaaaagtctctttatgtcctttgccgactttttaatgggattctttggagttttctgttgtagttgagatctttgtttactctcggtattagtcttttgtcaaaggaaaagtttacaaataatttcttccgttctgcagtttgtctgctcactctgttgagaggattatttctttggctgtgcagcagctttttgtttcagtaaagcttttgaatttatataattaaaattttcagtttggtttaaatttgcactggtcgatttttggttttgttgcctgtacttttgaagtcatactcttgaactctttactagacaataaccagaagagttttctctagttttcttctcacatttttattatttcagtacatatatttaagtctataattcatcttcaattgatttttgtagaaatagtgagaaataggagtccaggtttattcttctgcaaatgacaattcaattgttccagcaccaattattgaaaagggtgtgctttcctcaacgtatattcttatcagctttgtcaaagatcagttggctataaatgtgtggctttctttctgggctctctagtctgttacatcaatctgtgtgtctatctgtatactactaccatgctgtattggtgatgatggctttgtaatataatttgaagtcaagaaatgtgatgctcccagctttgtttatttgcttcagaaaggctgagtcaacagctgcagagatgaagctgcccctcctcgcagggctccttcccggaaaaagatcatggctcccactgaccatataaccatggctggaactcctgaaattcccaaagggaggccctacccagtgaggggggatgaatgaaggtcctacttaaggaatctgtctggccacaatcaggcacagcagctgtgctgccttgtgggggaccagaccacctggattccctggagcctgcaggctagaatgtctgagtccatggaaacacagaaatggaggccgccctcacctccccagaaaactgtagtctcaggcagtctccagccgattgccactggttggctgctattccaagccagtgggtcttaacttgagaggtgctgtggaagtggggcccacggaatgaggctgcttggctccctggattcagccccttttctaagggaatgtacagatggaactcccgccttgcccagctttccaagtatataaaactcctgagtctctgtgagtgtctgagcgagtgctctggcaacattcgacacggctctgtgtatctgacccaagacccttatggcatgagctaatgggaggatcttctgatccatgcgtggcaaagatgcatgggagaaacatggtttgtgggtaggggttgtgcattcactactgcttctcttggctgtaggtgaaggtttctttggctctgtgctgatactgggtgcaccatcacccaccccctttgtttcttctcctgggtcaagtcatttgcctaatcagtcccaatgtaggaacctggatacttcagttcaaggtgctgaattcaccgtgcttttcattcaggggaagacagctgcttctcattgggcatcttggcctgcccacttcacgtcactttttgtaaaatccacaccactccaggaatatccattacttaacttcgcctgaaataaacagaaggctcattacacttatcatgggctcacttacttcgcctataatgaaggtgccatggaaatgctagtggatgacgtggtccattttcttagggatgagatagaaaaatggtgtatggctttttaatttaattaaaatttttagtttggtttaaatttacattggtctctttttggttttgttgcctgtacttttgaagtcttactcgtgaactctttactggacaatgaccagaagagttttccctaagtttcttctgatattttgaccatttcagtacatacatttcagtctataattcactttaaattgatttttgtaaacatggtaagaaataggagttcagatttattcttccgcatatgataatgcaactgtcccagtaccaattattgaaaagggtgtgctttccctagtgtatattcttgtcagctttgtcaaagatcagttgcctatgaatgtgtggctttcattttggattctctcgtctgttacatcaatctgtgtgtccacatttatacctgtaccatgctgtattggtgactatggctgtgtaatatattttagagttaggaaatgtgatgctcccagctttgttcatttgcttcagctgaaaaggttgagtccacaattacaaagatggcagccgcccatccccggaggacctccaacccagaaagagatcaggcttcccaccaaccctataaccctggctggagttcctgaaattccaacagggaggaccttcccagtgaggagggatgaatcaaggtcaaatttaaagaaacagtctggccactatcaggcacagcagcagtgctgccttgtgggggacccctcctgctccagaccagctgccctccctggagcccgaaggctagattgtctgagtctacggaaacagagacggtggccgccccaaccacccagaactcggtagtctcaggcacttggcttgctatcttgccactgcttggctggtattccaagcccgtgggacttgagaagtgctgtgatgatggggaccacaggatgaggctgtctggctccctgtgatatggctgtgatgagtggaggaacaccagggctcatgtctcacacagaattggagaaaatgacacaaacacatgtacagtggttttatggcgtgcagtttaataggcaagaacgaaggaagagctccccatactgagacagagggaggggggctccaaagccaaaagaggaaacccggagtgctgtggataccaatgagttatatgaagaaactggagggggcggtgtctgatttgcatagggttcaggcgattggttcgaccaggcatgtcatttatgtggcccacggaaaaactggccctcccacctagcctttgaatatgcacgtgccggacaccctgatttcctacactcatggggatatatgggggtggccatatcgccaggcacaggtggggacaagggccagaagagggcgggaatcgctatgtttgggtggacccagtttctaatggccggcatctgcagatcaaggttaccggagaactctaaaagccggggctttcctgctagacaagactcatttctggagctgctttaaaaagaaacaaaacttcccaaggaccccttttcctccctgtctgcccaaaataatttcttaacaactcgtataacacctgaattcagcccccttactgggggaatgtaccaacggaactcccacctttcctggtttctcaaggctagattgtgtaaacctcctgggtctcggtctgtgtctgagcagctgctctgccaacactccacacagccctgtgtactaggcccaaggccgccgtgactcagcccatgggaggatctcctgatttcttggttgcaaagatccatgggagaaaaatggtttctggggcggggtcacacactcatggcttctcttggctgtgcaagaaggttcctttggctctgttccaatatagcgtggttcatcacccacccctgttttctttgttctcctgagtcaagttgtttgcctagtcagtcccaatgtgagaacctgaatatttcagttcacgtgcttatcgtgaaattcactgagactttaattcagtggaaggcagcctcttctaattggccatcttggcccgccccctccacgtcacctcccataaaatggccacgctctccagggacgatgccattatatatctttacgtgaaaccgacagaacacttattacactttttgtgagctcatttacttcacttataatgaacatggccatggaaatgctagtggagaaagtggtcgattttctgatggatgtgataaaaaaatggtttgccgaccaattaatgacatatgtctcaaaactagtaacgagacccttaatcgctgggttgaagtttctaatcaagaagatgctcatctatgtattcaacaaagcagcttcccttgcttctgaaatgcttccaaacaacatctcatatttcctgaagaagataatgcctggacaagcagcacaagtcattcaggtttactttcagctcataaatccagcaggatattcgcacaattgttgggaaaccttatcagttcatgagtcgtgcatgtttcctttaatttcaggaggaagagggtaatctggaagagtttcctgacctactctgctgctgtgattaaacaaccaccaggaaattttgatgacactgttctcctgagctcctccctttcctcggggaagaaaagcattgaaactacaaaaataaagtgttatttggctggagtgaggtctcatgtctgcttatgcggtggctcgctgctcagaacagggtgagtctctgagttgtacgctgaggaggggaggctgtcaatctagaaaaaacccattgcatgggacacctccatggggtctggggggctgaggatgaggagctggactggatctagggaaggaggaggtttcagagggtgaaattctggcagtaaatcctgggggtgtttgaaaacttcctccctcagaaggagaagactcagggaggaataaggacaaaccatgggtcccttgaggggcatttactaacttaagaggactttatcgggaagcagagtgacaatggcctccttgaggactgaggcccctggataaatgaggcccagatccagatccagtccatgggagatgagaccttcaagggacatatttttgttgggacagaggaaaagtgcagctctgcagctgcagaggaagccttggcagtgtgaaagcgaccttggagggggccctgtgcgttctgaatgcttctgaggtccatcccctgtccccgcctctttttctggattttttgggctccatggtctccgccatcttctgagcgctccacgctgccaccttcagttttctcttctgggctccaaatactccaaaatctttcatatctgtgcccctacccctgtttttagcatgtgttgggactccaggtccctgaaggtttctggcctgaaatccacctccccagcggtgtggattctgctctagagaccccgcacttggcaaggttcccaggcccctgggggacaaccgagtggtatgtgcacttcagggctccacactcggcaaggtctttcaagcccttggggttccctcctcagttttcttcacatgtctgggatgtagtcactctataaatgccgggatgtgatccccaccccagtgattttttttagttccatgagtgttgctatctgaatagtcatcctgagagtgatgggaccttttgaatttgcagcaagttttagattagtgtgagtggcctgagatcgcaaaactggggctagcattggatgtgaggttaggctggtggaaaaatttgcccagaacctgaggagtgtgggctcactgcaggtggttaggatcagcacagaattgcaaggatgtatagctttggggtaaagaataacatggttcagaagtacatgtattagtcttttcatgcattgctataaagaattacctgagactgggtaattaattataaaaactcaggtttaattggctcatggttccacaggctgtacaaaaaggatgatgctggccatcagctcaacttctggggaggcgtcagaaaacttagagtcatggcaaaaagcacaagggaatcaggctcatcctccatggccagagctggagctagtggtaggagaggtgctgcacacttttgaacaatcagatctttttagaactctatcaccagacagcacctagaggatggtgctaaattattcatgaaatatccacccatatgatccactcaattctcaccggcccaaccaggaccacctccaccattggggattacaattacacatgagatgtgggtggggacacagatccaaactcgatcagtgggcatcttggactgggtctactatagaagaagaaccaggagctgactatcatccttaagactgcccatgatggccaggcagggtggctcatgcctgtaatcccagcactttgggaagccaaggtgggtgaatcccctgaggtcaggagtttgagaccagcctcgccaacatggtgaaaccctgcctctactaaaaacacaaaaaattagatgggtgttgtgccagacgcctgtaatcacagctactccagaggctgaggcatgagaattgcttgaacctgggaggcggaggtggcggtgagccccaatcgcactgctacactccagcatgggcaacaataccaaaacatcgtctcaaaaaaaaaaaaaaaaaaaaaaaaggctgcccatgaccactgccccagtgagagggacaccagcatggctaagatcaagtgctggacattcttcatgggtcagacattaaagcaggccacactgttacagagatgggctccattcatagcaacaaagtggtgagaagatgtgggaatggcagaggccagcactttgccatcaatgcaaggtgggcataaggagctggcaccagtgccagagtgcatcaggggaggactgctttgcaatatctagcacttacctcttagagtatgtttcattagggacaacagatataaatggcagacaagtgagtcccttcagtaacaggaaatagaaatcatcaagaggaacagaaacagatgtcagcagccctcatataaagtcatcatccttcatccagttaaaacctgagacagttctcacataagaaggtctaattcaaaaagagactgggttctcatgaggcaggttcatgcaaaaccaagggaagtatacaactttgggattctccagcttcccttggaaaagacctacaatcatttgcttaggtaactgagcactgaacaaaggtgagtattgttatctttcagaagctgttggccatgaaggtcttgctggcataaaacccatggttggaaacatcaccatgacccctgttagagtaatggcctaagggcaagggtcaggaaattgatgtattccttgccaacttctgcgagacgagtgttggtccactcatctctttcacggaattcaccagtctggtatcttcaaaatccagaaggatgatggcagatggcaggaaactaatgcaaacaccatcagttgtacctccactgtagcagcagtaatggatgttatctcttcattgtaatatccagggagggagaagatgacattattctcaatattctaaacaccctgtgtgtacagcctctgtgatattttttgtaatatccgtgtgggagagaattatattactcctaatatctcaggggttgtgccccctctgtgacaatgttcctaacacccaggaggggataggatgatatcacttttagcatcacagggggtgtacaccccactgtaatattgttcataatatccgggggggagagaatgatattactcccaatatcgcaaagactgtacaccaacctgtgatattatttgtaatatccataagaggaagaataatattactcccaatgtcacaggaagtgtacacccttctgtgatattgttcaaaagatccagttagggaggggatgatattactctcaatatcttaaacaccctgtaggtaagccctctgtgatattcctcataatatccagagggagaggatgatattactcccaatattgcatgaagtctacaccccacctgtgatattgttcctaatatccaggatgggagaggatgatattactcccaatgtcgcaggggatgtacaccttccctgtaatattgttcgtaatatctagaaaaggagaggataatattactttcaacatcgcagggggtgtacaccttccttgttatattgttgctaatatccagggaaaaagaagatgacattaccaccactattgcagaaggtgtacacccccccttgatatagttcctaatatccagaaaaggagaggagatattactccaaatattgcaagaggtgtacattcccctgtaatatttttcctaacattcaggaagaaagagagtgatattgcccttaatattgaagggagtgtgccccccccgtgatattgtttctaatatccaagaaatgaaaggatgatattactcccaatatcacaggggctgtacagccccctcccatgatattgttcccaacatcggggggggggtgaaatagtattattcccagtatcacaataggtgtacacacctgtcgtgatattgttcctaatacccatgggggaaaggacgatattattcttaatatctcagagggatgtacaccctccctgtgatattgttcctaatatccggggtgggagaggatgatattacccccaaaatctcaaagggtgtacacccctcttgtgatattgttcctaatatccagggtggagaggataatattattcccaatatccaggaaaggaaacgatgatgttactgtgaatattccagggggtgtcctcccctctgtgatattgttcctaatatccaggttggggagattatgatatttctccaaatatcacaaggggtgtacaccaaccctgtgttattgttcctaatatcgatggggggagaggacgatattactcccaatatcacagggggtgtacaccacctttatgatattgttcctaatatccatgaagaaagaggatgatattactttcaatatcgcaggggatgtacactccccctgtgatattgttagtaatacctaggagaagaaagtgtgatattactcccaatatcgcaggggatgtacacgcttcctgtgatattgttcctaatatttagggggaaaggggatgatattactcccaatatcgaatggtgtgtacacccccccgtgattctttttttttttttttttttttttttgagatggagtcttgctctgccgcccagactggcgtgcaatggcgcaatctcggctcactgcaacatttgcctcccaggttcgcacgattctcctgcctcagccttcggagtagctgggattataggcagctgtcaccataccaggctaatttttgtatttttagtagagttggggtttcaccatgttggtcaggctggtcttgaattcctgacctcaaataatccacccaccttggcctcccaaagtcctgggattacaggcataactttccctgtgatattcttcctaatattcaggaagaaagaggatgatattgctcccaatatcgcagagagtgtgcactcctcctgtgatatggttcttaatattcagaggaggagaggatgatattactttctatattgcagaaggtgtacacctccctcgtgatgtctttcctaatatccagtgggggagaggttattagtctcaaaatcacagaaggtgtaaacccccatttgatattgttcctaatattcaggggtggggagagaaaggtattactcctagtatttcagggcatgaacacccccaccgtgatatcattcctaatatccagaaggggaggcaatgatatttctcctaatatcacaaagggtgtacaccccttctgtgatattgtaaatattctgtgtgtacacccccctgtgttatagtctgtaatatccgggtgggggagagggtgatatttctccccatattgtaggggatgtacacccttctgtgatatggttcgttatatccagggaagaaaaaggtaatattgctgcccatattgtggagagtgtacacccccatgtaatatggttcgtaatatccaggagtggagagggtgatactgctccttacatcgaggaaggtgtacaccttattgttatatgattcgcaatatccaggggaggagagagtgatattgctccccatgtcgcagggggtgtaaaccctccgtgatatgattggtaatatccaggaaaggaaagggtgatatttctccccatatcgcgggggacgtacatcctcctgtgatatggttcgtaatatccaggaggaaagaggaaaatattgctcttcataacccgaggggtgtacaacccctgtgatatggttcgtaatacccagaagtgtacacccctctgtgatatggtttgtaatatccagggggttagagggtgatattgctccccatatcgcagtgggggtacacccccctggattggttcataatattcatggggggagaaatttacatttatcctcatatcagggggggtgtacaccccccgtgatatggttcgtaatatccaggggaagaaagggtgatattgctccttatatcgcggaaggatcaccctcccctgtgatatggttcataatacccagacgggaagagggtgatattgttcttcataaagcgaagggtgtacagccccctgtgatatggttcataatatgcaaaaggggagagggtgatattgctccccatatcacggagggtgtactcccttctttgatatggttcgtaatatccaggggtgtagatggtgatatagctcgccctattggggagggtgttcacccctctgtgatattgttcgtaatgtccagggaaagagaggatgatattactcccaatatcgcagaaggtttacaccactctgtgatattgttcataatatccagggaaggagaagacgatattactcccaatatggcagggggtgtagaactcctgtgatattgtttgtaatatccaggcaaggagaggatattactctcaatatcgcagaaggtttacacccctatgtgatactgttcatgatatccagggaaaaagaggatattactccctatatcacaaagggtgtacacccctttgtgatattttttgtaatatccaggggagagaggataatattactctcaatatcagaaggggtgaaaaccctcctgtgtcattgttcataatatttagggaaggagagagtgatattactccaaatatcacagtgggtgtacacccccctatgatattgttcctaatttccagaaggggagatatgatattattgccaatatcgcagaaggtgtacaccttactctgacattgtttgtaatatccagatggggaaatgatgatattactcctaatatcacagggggtgtacacccccttgttttattgtttgtaatattcaggggaagagacgattatattactcccaatatcgcagggtgtgtacaacactctatgatattgttcataatatccaggggaggagaggaagtgtacacccccccgtgatattgttcgtaatatccagaggtagagaggatgatattactcccaatattgcaggtggtgtacacctttctgtgatattgtcatgatattaagaaggggagaggatgatattactaacaatatcacaaaaactgtacactccctgtgatattgttcataatatccagaagaagggaggatgatattattctgaatctcgcagaagatatacaccaccctgtgatatggttcataatatcctaggggaaagaggatgacataactgtcaatatcgcagggggtgtacaattccctgtgatattgttcacaatattcagagggaaaaaggataatattactttcaatatcgcaggcggtgtacacattactgtgttattgtttataatatccggaatgagagaaaattttctcccaatatcacaggaggtgtacactcccctgtgatattgttcgtaatatccagggaggggagaggatactattactcccaacatctcagggagtgtaggccccccctttgatattgttcctaatattcggaagtggagaagatgatattacttccaaaatcgcagggggtgtacactccctctgtaatattgtttctaatattcatgagtggaaagaaagatattactcccagtattgcaggggacatacaccacactgtgatcttgttcacaatattcgggggggagaggatgatattactcccaatatcaaagtaggtgtacacccccttctgatattgatcgtaatatccagaattaaagatgataacgttactcccaatattgcagggggtgtacatttttgaatactgttcataatattaagagggggaggggatgatatctgtcccaatatcgcaaagtgtgtacacctcctgtgacattgtcccaaatatccagaggaaaaaaggatgttattactcttaatatctcagagagtgtacacctccctgtgatattgtttgtaacatccagaagaaagaggctgatattactcttaatatcgcagggggtgtacacccccgccccgggatattattcgtaatatccagggggaagtggaatgttcagaatgggagaggatgatattacttgcaatatcatagtgggtgtacaccccactgtgatattgtttgtaatatccgggaaaggagaaaatgacattcctccccatatggcaggggctgtacaccacctatcatattgttcaaaatatccagaaggggagaggatatgtctccaagtatcacagggggtgtacaccccgctgtaatattcttcctaatatccagggtgtgagaggataatagtactcccaatatcccagggcatgtacaccccccttgtgatgttgttcctaaaattcatggggagaaagaatattactcccaatatcacagggggtgtacatacactctgtaatattgttgccaatatgcagcaggagagaggatgatattactcccaatatcacaggggctgtacaccccgctgggatattgtttctaatatcaagggggaaaaaggatgatattactcccaatgtcgcagggtgtgtacttcctctttgtgacattgttcctaatatccaggagagaagagggtgacattccttccaaaactgaaaggggtgtacacaccctttgagatattgtctttaatatccagaacgaaacaggatgatataactcctaatactgcaggggggtacaccctctctgtgatactgtttctaatatccaggaggggaaagaaaaatattaatcccaatatcacagggggtgtacattccccctttaatattgttcctaatatccaggaagacacaggatgatactatttccagcagcacagggcatgtacacccctttgtgatattgttcctaatatccaggaaaagagaggatgatattactgtcaatattgcagggcgtatacactggttctgtgatattgtttctaatatccgggggtggagaaaatgatattactcccaatattccagcgggtgtacacccgttctatgatattgttcctaatatctgggggagagagaatgatattattgtcaatatcacaggggatgtacagattccctgtgatattgtttctaatattcacagggggagaagggtataatactcccgatatcgcagggggtgtacactccccctgtgaagttgttcctaatatccagggattgagagaatgatattactcccaatatcacaggcggtgtaaaccccctgtgtgatattgttcctaacatccagaggaaaagatgatgatattattttcaatatcacagggggtgtacgcatccctgtgatattgtttctaatatccaggggaggagaggatgatattattgttaatatcgcagggggtgtaccccaccctgtgatactgttcctaatatccggggtggaagaggataatattgctcccaatatcgcaaagggtgtacaaccttcctgagatattggtcctaatatccagggagggagaggatgatattactttcaatatcacagggagtttacacaacccctgcgatattgttcctaatatccagcggaagaagagttaggataatactattttcaaaattgctgggtctgtaccccctccccgtgatattgtttctaatatccaggaggggagaaagtaatatgactcccaatatcttagaagatgtacaccctccccataatattatttcttacatccagggggtagaggatgattttgctttcaatatcacagagggagtaaacctttccggtgatattgtttttaatatttaaaaagagagaagataaaattactcccaatacaaaggggatgtattgtgtactcccccctctgatattcttttttaatatccagatggagagaggatgatattactttcaatattgcatgggatgtataaatcccctgtgttattgttctgaatatacaggtggggagagtatgatattactccaaatatcgcagggggttctttccccctgtgatattgttcctaacattcagggagggagaggatgatattactcttaatattgcagggggtgtacccacgcctatgatattgttcctaatatccagagggggagaggatgatctaactcagaatatgacaaggggtgtacacacagcctgtgatatggttcctaatatacaggggagaaggggataatatttctcccaatatcgcagggggtgtacaaccccctgtgatactgttcctaatatacagaaggggacagcatgatattgttcctaatatcgcaggaggtgtacaacgccctgtgatattgttcctaatatccagggcgggagaggatgatattaccctcaatatcgcagggggtgtgcactttccctgttatattgttcctatgatccgggtggggggaaatgacattagtcccaatatcgcaggatgtgtgcaccgctcccccgtgatattgttcctaatatcaagggggagagaggaggatattactcccaatatcgcaagggatgtacatcctccatgcgatattgttcgtaatattcaggaggagagaggatgatattactcttaatatcgcagaaagtggacacccaccctgtgatgttcttcataatatccagggaagcagacgattatatgactttcaatatcgctgggagtgtacatcccttttgggatattgtttctaatatccaggaagggagaggattatattactctcagtattgcaggcagtgtacaccttttttgtgatattgttcctaatattcagaaagggaaaggatgatattactcccaatattgcaggtggtgtatatccccctctgatattgttccttatatcaaggaagagaaagaataatattactcccaatatcaaagacagtgtagacccctcctgtgatattgtatttaatatccatggggaaagaggatgatgttactcccaatatcgcagggggtttacacccacactgtgatattattcctaaaatccagtggaggagaaaataatattgctcccaatattgcagggtgtatacaggccctcccccgttatattgctcctaatatccagcggtggagaggatattactttcaatttgtgtagggagtgtatacccccctgtgatatttttctaatatcaaggatgggaaaggatgacattactcccaatatcgcaggaggtgtacacgccctgtgatattgttcctaatatctagggaaggagaggatgatattactttcaatattgcaggagctgtacaccctctgtggtattgttcttaatatttaggttgggagaaaatgatatgagtccaaatatcgcagaaggcatacacacttccaataacattgttcttaatatccgggggagagggtgatattactcccaaaatctctggggggtgtacacccccttctgatatttttcctaatatccagggaaggaaacgatgatattactataaatattccaaggagtgtacaccttcctaatatcctaatattgttcctaatatccaggggtgggagaggattatattactcccgatatcgcagtgggtgtacacccctcctgtgatattgtttctaatatccaagctaggagaaaatgatatcactctcaataccacagggggtgtacaccttccgcatcatattgttcctaatattcagagggaaagaagatgaagttactttcaatatcggaggggttgtacacaacccctgtgatattgctgctagtatccaggaagaaaggggattatgttactccccttatagcagggggtatacacctcccctgtaatattgttcctaatatcaaggctgggatatacgtggggggaaggatgatattactcccaatatcgcaggggttatacaaccttctgtgatattgctcctagtaaccagggcagaagaagatgatattactcctaatatcgcaggaggtgtacactcccccattatgttgttcccaatatgcagaaaaggagaggatgacattattgccagtatcgcagggtgtgtacaccacccctgtaatattgttccaaatatttagggggagagaggatgatattactcccaacatcgcagggggtgtacacacatcccctgtaatatagttcttaaaatctaggggaaaaggggatcttatttctctaaatattgcagagggtgtacactccccggtgatattgttcctaatagccgggagggagataattaaattactttcaatatctcagagagtgtacatcgcccttgcgatattgttcctaatatccagagcaaaagagaatgatattactcccaatatcttaggagtgtacatttaacctgtaatattgttcctaatatccagggggaagagaatagtattactgccaatatcgtaggggttgtacaccttttctgtgatattgttgcaaatatttagtagagggaaagaatattactcgcaatatcacagggaatgtatacttcccctgtgatattgttctgatatccagaaaaagagagggtaatattactcccaatattgcagggggtgtacaccccccttgtgatattgatcctaatataaaggaaggaagaggatattactcctcatatagaaggggttgtccaccccccttgtgatattattcctaatattcagggaagcagaggatgatattattttcaatatcacagagggtgtgcagtccacctgtgatattgttcttaatattcggggggagaggatgttattatgcctgatatcgcagtagaggtacacccctcaagtgatactgttcctaataaccaggggtgaagaggatgatattactcccaatatcgcaggtggtgtacacccccccatgatggtttctaatatacagagggggagaggaaaatattactcccaaaatcgctggaggtctacaccccccttgtgatattgttcctaatatccaggaaaggaaacgatgatattactgtgaatattccagggggtgtacacccgctttgtaatattgttcctcatatccagggtgtggagaggattatattactcccagtatcgcagggggtgcacgacgcccctgtgatattgtttttcatatccaggaggggagattattatcaatatggcaaggggtgaacaccccctgtgatattgtacttaatagttaggttggcagaaaatgatattagtctcgatatcgcagggggtgtgcactccgcctggtgatattgcttttaatatcaagggggagaaaatggcattactcccaatatcgcagggggtgtacaccgctcatgtgatattgttcctaatatccaggtggagagaacataatattactcccaatatcgcacaaggtgtacacccctcctgtgatatggttcctaatatccatgggaggagatgatgatattactcccaatatcacaggggatgtacaccacccttgtgatattgttcctaatatccagggaagaaaacgatgatattattgtgaatattacagggagtgtacacactccctgtgatattgtttttgatatacagggtgggagaggatgatattactcccaatatcacataaggtgtacaccccccgtgatattgttctaaatatttcggtggggagaaaatgatattagtctccatatcacagggggtgtgtgctcctcaggtgatattgtttttaatatcaagagggggaggagattatattactttcattatcacagggggtgtacacccctcctgtgatattgttccttatatccaggcgaggggaaaataatattactctcaatatcgcaggaggtgtacacaccccatgtgatattgttcctaatattaagggggaaagaagataatattactttcaatatcacagggtttgtactcctttcttgtgatatagtttttagtatccagggggaaagagcatgatattactcccattgtagcaaggggtgtacacacctcctgtgatattgttcctaatatccagaagtggtgaggatgatattactcccaatatcgcagggggtatacaccccacctatgatattatttctaatatccatgggaaaagagtatgatattacacccaatgtcgcagagggtgtgtatttttcctgtgatattgtttctaatattcaggcggggagaagatgatattactctcaatatagcagaaattgtacatccccgctgtgatattcttcataataatcagggaaaaagaggatgatattactaccaatattgcaggggggttacacttcccctatggtagtgttcctaatatccaggaagaaagaggatgatattaatcccattatccaggaagtgtacacccaccctgtcatgttgttcctaatatccagcagggaagaggatgatattacaccccccccccgtgatattctccttaatatccaggaggggagaggctgatattactggatatatagcaggggtgttcataccttctgtgatattgttcctaatatccagaaaaggagaggatgatattacttccaatatcgcagaaggtgtacacctccctgtgatattgatcctgacattcagaaggggagaggatgatattactcaaaataccgcagggcatgtgcattcccttgtgatattgttcctaatacccagaagggaacaggataatattactttcaatatcgcagggagtgcacacccccctttggtatggttcttaatatccagaaggaaagagggtgctattactttccatattgcaaggggtgtacaccccactgtggtatggttcataatatccaggcagggagagggtgctattactccccacagtgcggggcatgtacaccctgctgcggtacggttcctaatatccagggggagagaggatgctatgactccctatatcgcggggtgtgtacacccctgtgtggtatgttttgtattctccaggaacggagagggtgttgttacccctcatatcgctggaaatgtacactcccctgtggtatggttcgtaatatccaggggattgagggtactgttacccccatactccccatatcgtggggggagtgcacctccctgtggtatggttcgaaatatccagggtaagagagggtgctattattccccattttgcaggaggcgtacacccccctatggtatggttcgtaatatccggggtgaggggatgctatcaaaagaagagagaaagagaccccccatattgttctatattattttatactcagtacctgttttaagaagaaacaaggaagtgaaaccaaaagcaggcagcccggcgccaggcaccagacccaaaaccagacccgaaaccaggcctgggcctgcctgaccttagcctgatagttaaaattcaacccatgacctagcaaccaatgttatccatagattccagacattgtatggaaggacattgtgaaatttcttgttctgtgctgtttcactctgattaccggtgcctgcagcccctgtcacatacccactagattgctcaatcaatcatggccctttcatgtaagatctttagtgttgtgagcccttaaaaaggacagaaattgtgcactcaacaagctcggattttgagacgctagtctttcgatgcttccagctgattaaaagccacttccttcactacctcggtgtctgtggggttttgtccgcgactcctcctgctacactatgactccccatatcaaggggggtgtacacccccctgtggttcgtaatatccagcaggggaaaaggtgctattactccccatattgcagggagtgtacacccccttgtagtatggatcgtaaaatcaaggggggagggaaggtgtaattatccccatatctcagggggtgtacacccctttgtggtaaagtttgtaatatccagggatattacagggatattatccccaaattaatacttttataatttcttatgcctgcctttactgcaatctctgaacataaattgtgaagatttcatggacatttatcacttccccaatcaatacttttataatttcctatgcctgtctttactttaatctcttaatctcatcatctttgtgagctgaggatgtatgtcgcctcaggaccctgtgatgattgcattaactccacaaattgtttataaaacatgtgtatttgaacaatatgaaatctgggcaccctgaaaaagaacaggataagagcgatgttcagcgaacaagggagataagcataaggtctgactgcctgtggggctgggcagaacagagtcacatttttcttattgcagaaaatgagtaggagaaatatcactgggaagggaacgcattcctaggggaggcctatggacggccgctctgggggtgtatcccttatgtggttgaagataagggatgaaatacaccctggtcccctgcagtgccctcaggcttgctaggattagaaattccagcctggcgaattctagtcagaccagttctctgctcttgaaccccgtttcctgttaagatgtttatcaatgacaatgcgtgcacagcaggacatggaacctcaatagtaattccattttctccctggccttgtgaccttgctaggcccttctgcccttgtgatcttttattgccatttgaagcatgtgatctctgtgacccactccctattcgtatccccctccccttttgaagtccctaataaaaacttgctggttttgcagatcaggtggtcatcacagaacctgccgatatgtgatgtcaccccggaggctcagctgtaaaatttctctttcgtactctttcactttatttctcagaccaggtgacacttaaggaaaatagaaaagaacctactttgaaatattgggggctagttcccccaatagacattgttcctaatatccagaaaaaaagaagatgatattactcccaatatcacaggggttgtgaaccccacctgtgatatggttcctaatatccaggaagggagagaatgatattactctccatattgcagggggtgtgcacatccctgtgatattgttcctaatatccaggggaggagagggtgatattactcccaatattgcaagggttgtaaactccaccctgtaatattgctcctaatatttaggatttagggggggagaggataatattactcccaatatcgcaggggatgtatatgccctctttgatattgttcctaatatccagggggggagaggataatattactttccatatcacaaagagtgttcacccccctgtgatattgttcctaatatccaaaaaggaagaggatgatatcaatcccaatatcacaggaagtgtacaccccccccttttatattgtttctaatatccaggggaaatgagggtgatatttctctcaatatagcagaatgggtacactccccctgggatattattcctaatatccaggggaaaaaaagaggttgatattcttcccagtatagcagggaatgaatacaccctttgtgatattgcttctaatatcaaggggaaaagaggatgatatgactcccaatatcacaggggatgtaaacctgtggcgttgttgctaatatcaaggagggaagagtatgatattactcctaatgtcgccgaaggtgcacactttccctgtgatattgttcctaatatccaaaagggaagagaatgatattacccccagtattgcagggtgtacaccacccctgtgatattgctcctaatacccaggaaaaaagagaatgctattacccccaatatctaaggggacgtataccttccctgtgatattgtttctaatatccaagtggggagaggatggttttactctcaatattgcagggagtgtacactccccctgtgatactgtttctaatactcgggctgggagaaatagtattactcccaatatcgcagtgatattgtttccctgtgatattgtttctaatatctagtgggggagataattatattactaccccatacacaggggagggtgtacattcccctgtgatattgtttgtaatatccagggaaggagaggatgttactcccaatatcacaggggttgtacaccccttttttgatattgttcctaatatctggggggcagagaattatattactgtcaatatcacagagtgtgtacaccccctctgttatattactctttatattcagggcggtagaggatgatattactccctatatcacagggggtgttcacccctcctgtgatattgtttataatatctaaggggaaagaggatgatatcactctcaatatcaaaggaaatgtacacctttcctgtgatattgtttttattatataggggggcagaggatgatattaagaacaataccacaggggatgtacacccacgtattgatattgtccctaatatgtatggggaaagaggacagtgtaactcccgatatcgcagagtgtgtacacccccttgtgatattgtttctgatatacacggggagaaaagataatatttcttccaaaattgcagggggtgtacaaccccctgtgatattgtttttaatatccagtgggggagagaatattactcccaatattgcagggcgtgtacacaacccctgtgatattgttcctaatatccagagtaggggaggatgacattactttcaatatcgcaaggggtgtacattcccctgtgatattgctcctaatatccatgaggggagaggatgatattattcctaatatggcaggggctgtacaccttccctgtgatattgtttctaacatccagtgggggagaaaatgatattactccctatatcacagaaggtgtacactttccctgtgatattgttcctaatatccagaaggggagaggataatattactcccaatatcgcaggaagcttacaactcccctgtgatattgtttctaatatccagggaggtagggatgatattactcccaatatcgcaggggatgtacactcccccgtgacattgtttctaataaccagggggtgagaggatgatattacgcttaataccgaagggggtgtacacacccttgtgatattgtgcctaatagccagggggaagaaaattatattaattttaatatttatggggaaaaaggatgatattactcccaatatcacaggggctgtacaccgaccttttgatattgtttttaatatccagaagagaagaggataatattgctcccaatatcagaaaaggtgtaaaccccttctgtgatattggtcctaatatccagggagggagagaataatattactaccaatatcacagaaggtgcccacccccaaggtgatattgctcctaatatccaaagataatagggtgatgttactcccaatatcacaggaggtgttcacaccccttgtgatattgtttctaacgtacagggaagggagaggatgatattattcccaatatcacaggaggtgtatactcctctgtgatattgattttaatattcggggggaaaggatgatattactccctatatcgcagagggtgtacaccctctgtaatattgatcctaatatccagggcgggataggatgatattactcccaatatcgcagaaagtctacacaacccccagtaatattgtttttactatccagggggaagaggatgacattactcccaatttcacagagtgtgtacactcaccatttgatattgtttctaatatctagggggagagaatatattactcccaatatcacaggaattgtacaccacctctgtgacattcttgtgaatatccggggaaaaagagaataatattactcccaatattgcagagcgtgtacacccctccatgatatcgatactaatatttttttaaagaggatgatattactcccattgtcacaggatgtgtacaccccccttgtgaaattgttcataatattctggggggagagcataatattactccccatatcgaaaaaggtgtccaccctccttataatatggttcctaatatccaggatattacttaatccaggatacttgtaataccctaaatatacaattgcttgaacctccacctcccaggttcaagcaattcttctgcctcagcctcccgagtagctgggactacaggggcacaccaccacacccagctaatttttttttcttgtatttttagtagagatggggttttgccatattggccaggctggtctcaaactcctgaccttgtgatctgcccacctcagcctcccaaagtgctgggattataggcgtgacccaccgtgccaagccaggaagaggatgctctatagatttccccaataagagatggctttgcagggccattccaaaatatgtcaaagaaatacatttggggataaaatactttgatttcctttagggaatgttatctattatgtgatgctataccagagtcaggttggagtcggttatcttattgcaacaaagagtctgttccgtcactgttgggatctctattttttcctcttatttcttgagacagggtctcactctgtcacccagtctggagtgcagtggtgcgatcttcattcactgaaacctctgcctcctgtgttcaggtgattctcgtgcctcagccccttaagtaactaggattacaggtgtgcgccaccacacccagctaatttttgtattttcagtagagatggtattttgccctgttggccaggctggtcttgaactcctggcctcgtgtcatctgcccacctcgacctcccaaagtgctgggactgcaaatgtgagctattgtgcccagccaggatctctgttttaatgttagtgctggtcactttgcatgaactccaaagggaagaaatataatgaggtgtgtctgaccccctgccttctcatcgtgacctgaattagtttttcaggtttgcaggggatacccttggacaagaaggggctctattcggttggttggggggattagaattttactttttgtttacaatatttctcctgaaagagttaggggctcacaaggaatttccgcgtgagcaacttatgaggaaagccatctgggaagatatgtgtccttgtgtcactgggatattctcgtttaccccaatgatacggcaatgacgcagggttgtgaaattacagctatgtgtttggggaaaaaagaaagcaggattgtgtgactacgtttccaaacttcacttgcccttagccatagtgagttgggggcctggagattctgttttctttcacaatgatatagatacaattaaatgtatagaaagcaaaaaaataaaaaggtgagtaatgaggaacctctgattcctgagtggccatgtagttacccatggcacagagccacagttactgaaggtaaagtttgctggggaatttagaaatgaatccagctcttggaggagtcagtttactggatgcctaagaaaatgcaaacaaaataagaaaaaagggtaatattcaatcccatagttattgttacctgtcatagctaaagtaaaattaaaacagagtgctggcttcaatcttgatgctacactaagcttagatttcagtgaatgtgagtctcagccactagctcagagccacctcccaaagaccaaatcatgtagggacaatagaaagtacttctgagaattgtggttaccaagaacctagtaactgttggggaggagcaaaacaaagtacagaaaccagagggtacaatctgagtgagactgctatcagcttctggaggagcctttactaaaatgaatgatgagagtaactggatgatgagagtaactaatggatgatgagagtaagcaatgtctttggttttcttttttttttttttttttttttagcagacgtctcactcttgtcgcccaggctggagtgtaatggcatgatctcgcctcactgcaacctccacctcctgggttcaagcaattctcctgtctcagcctcccgagtagctgggactacaggcactcatcaccacacctggctaatttttgtatttttagtattttctggtgagggtccaggtttccggaaacaactcagagacatatgttaagatgttatctttagttttcacagggaaccaaatatgttacgactccaatttccttggctattgttttaagttaccattaccttctcgttgatcaagttgctcatttacttctcaagcctagctagatgcctggaatttcccttgaaggaagtcaagattttcctttatctccatactggctgatggtgatcgagtaagcccctaagaggggtccctgctccatctcgagatgctgctagattctacagtgcctaataaacagctctcgcctggccgacaaagagctgcttgctctctggatagcaattccaaagtgaacagacaacatcctgtttggaagactgccactctgttagaagaagcatcaggaaaacctttcttttgagctatttataactaacagcaattgaccaagtatacttttgtgagtgaaactgacctttctccctgtaagaattctccaaaatttggaaactatttgtgagtatttttacttatggcaatataattattggcacaagctcaatcagattcggttttctttcgtaacaggaaccattggagatactcattactctttgaaggcttacagtggaatgaattcaaatacgacttatttgaggaattgaagttgactttatggagctgataagaatcttcttggagaaaaaaagactgggtatattttcaatatgctttccttttaaggtccctcacctgtggaaagtaaagaatgtcactttctgacaggctcaggaacctcaagttatgtagggatctcaagaagatgggggaattcacccagttcatacaggtgaaattgctgttgcaaagattatgaatatgagagaagtccagcatggctgacttcatctcgtgtctggcctcaggctggctgcccttgctcactcttgggcataggccaagctagccatgggaggaatttagtttatagtttaactttgaagcacggatgataatagtctctccctaaaatgaaccccttccttgctcagggactgaaactacctttgtatgacaaatgaaagcccacaagattaagattatgagaggggcctgaattctgctaaaatgcaggtgtagctgactgataacaagtcattgtcccacagcttgcctttctataatctcttgcttctcaggagtcacatggccagaggtcctgagatttccagtcctgtgacccccacccagagatggacttagtgcatgaggaccattttccacacccctatgatttcatcctcaaacaatcagcagcaaccattccctagccccctgccttccaaattatccataaaaatcctagcctctgagttattagggagattgattaataatcccagtcctaccccttgggttgctctgatttaattaaaccttctctactgcaataccacggactcagtaaattggttttgtctgtgcaatgggcaagaagaacatgttgcatggttatacaggtactacaagcacagtctgatggcaaattattggttttgcttcctgcccttgatgtttctaaacatctagtccaaaattacttgtgaaaggtccagcaaagccaattttaaaagaggctatatggccaatcactattctttctacacattattgcaaataatcaggccacggctgggcacggtggctcatgcctgcaatcccagcactttgggaggctgaggcaggatcacctgaaatcaggagttcaagaccagcctaggcaacatgataaaaccctgtctctactaaaaatacaaaattagccaggcatggtggcatgcacctgtaatcccagctacttgggagactgagggaggagaatcacttgaacctgggaggcagagattgcagtgagctgagatcacaccactgcactccagcctgggcaatagagtgagactttgtctcaaataataataataataatcagaccaagtataatgaaattaaaatttattttgcaaataaattggtcctactacaatttatccttcatagaaatgtggaaactgaagataaaaaaaattaggtttcagaagaaaactatactacacctgttattagattctagccctaaacattgtttttgaggtttttattatttacctgcaatttggtctaaattctgaattatttcctgactacaagtatccaaggaataaatgggttttctttttctttatgatagttttagttggcttctaatgcaacaacaatttttattgtaatcctgtgtgcattctattcctactattcaaattattaatgttatagatctttcattgtagtacttctgaattaaccaaaatcacagtattctgaagatgattctacaaagcctgctgtttctacaaaggctgctgatgatttctacaaagcctgctgtagtgttgctgtggcctctgcttaaaaaagtagaaaacacattgatgcagcatgttcaccccaacctccctgcctaaaggctcagggaccatcttggaagaggaaggcgcgtgagattgtaagagccgaattagggggatggagtgtggagaataaggacacttcatcttggatgctcacctgccaaattgacttctgatgaaagccagctccagaaatgtgcctacagttactactttcacctaaaccctgcccttagtcaaatccttctcttcttctaagcaatcaacttcaattccttgtataacccacagtataaaagggcttttataccattctatcctattgcatgtaagccttgggtctgggaggtaacagtgtgggattccaccatctcatctccctgccacccaaacatgcctgctcttctttaagcaatattaaatgtttgtacttcagaaatttgatttgtcagcctcttcttcagactctcagcttctttggcctttgggagtaaatttgcataggcctgctcaaaacaggatgttctgggggtttgggggtgttgttttgttttgttttttgttttgtttagagacagggtctcactctgtcacccaggttggagtgcagtggtgcaatcatggcacactgcagcctcaaactcctaggctcaagcaatccccccaccttggcctcccaaagttctgggattacaagcataagccaccatgcccagccctggacttttctttaaagacatttacacagtgtaggaattactgtgggtgcactgctcaggtccccttctccaggatgctcattcctacctcatagatgattttcctgcagagatttgacctcagctgaagggcagtcacctggtccaggtggttgctattcacctccttcctgagaacagccaacagccagggacacgctagcacagagatataagagcgaccaaggtgaggccccttctgtgctgcggtgcatgctccagagcctccctgggatcagacttaagagggtctccagccagatctggtcttcgctgctttcctcgagctccccagcgcactcctgcaatgcatcttttttttttttttttttttttttgagacggagtttcactcttgttgcccaggctggaatgcaatggcgcaatctcagctcaccacaacctctgcctcgcgggttcaagtgattctccttcctcagcctcccaagtacctgggattacaggcatgcaccaccacgcccagctaattttgtatttttagtagaaacgggtttctccatgttggtcaggctggtttcgaactcctgacctcagttgatcctcctgcctcagccttccaaagtgctgggattacaggtgtgagccactgtgcctggcccaatgcacctcttgaatcacctcctcatgctttgcttttagagaacatgatccccaacatgtgattccagcaaagattctagaaagccaaccgtgacaatcacttctgggtttagatgacccccccccaccacaagatggcagtgagcacctcatcacagaggtgctgatggtctgcagcaccgcgccaggccagaacgtgccttttacagaagaaaataacccagtagctgactaggatggtgaggagggctggtgagcactgcggtagtgagagggacactagcatcactgagatgcaagtgatggtcatttttcataggtcaaagctcaaagcaggggacagttacagggcagggcttcatagcaccagtgtgatgaaagtatctgggagtggctaaggccagcactatgccatgggaagcaaggtgggcctgaggaggaggcagcagcgtcagcctgcaacaagtgggggctgccctgcagagacctaagagtcatgttatagagcacagtgtctgtaaggccaagaagtgtggacagccaagtgtgtcaattactagacatactcaagaggagcaggaagggcagggcatggtggctcatgcctgtaatcccagctacttgggagactgaggaaggagaatcgcttgaacccgggaggtgaaaattgcaatgagccgagatttcgccactgcactccagcctgtgtgatgggagcgggactccatctcaaaacaaaaaaagaaaaaggaaaaagaaaaaaagaaaaacctaggtatacttctcaagcaaataaaaataatcaaaaccaatatcatgcccgggcacaaatttcatatatataacagatttaaatatatgagggtgattatcctctcatatctccatttttttttgtttttccatttttttctttactaaaaaaagttaatgccaatgacacacaatttttttttttttttttttttttgagatggagtctcacttcttcgccctggctggagtgcaatggcgtgatctcgactcactgcaaagtctgcctcctgggttcaagcaattctcctgcctcagcctcccaagtagctgggaccacaggagtgagccaccacacccagctaatttttgtatttttaatagagacggggtttcaccatattggccaggctggtctcaaactcctgatctcaaataatctgcccgcctcggcctcccaagattctgggattataggcgttgagccactgcgccccgcctatgtatgattttttttttaattttattttcataagtttttggggaacaggtggtattttgttacatgagtaatttctttagttgtgatttgtgagattttggttcacccatcaactgagaagtatacactgaacccaatttgtggtcttttatccctcacccccttcccaccctttcccccggagtccctgaagtccattgtatcattcttatgcctttgcatcttcatagcttagctcttgaacccttactttctgtttgagggagaagacatatcatctacaagtagatactgtgtaaacattccattgcatgactatcccataacttatttattatttgtgtttggttatttgctgctatgtaacaaccccactcccaactaaatggtgtgacaattccatgattctgtggatcaaaaattctgaaaagtcaaacccaaggagttttgtctctgctccatgatgctaaagcctccgcaggggtgaggcgaatggctcagggtgactgaaaagctcagggttggaacagctggggatgaggcctctatgtataagatgattcttcactcacaggtctgaaactatggtggggacagccagaaggctcggctcagctgggacagtcacctgagccctacacatgacctctccaacatggtgatcctgaagcagttgggtttcttacacagcatcacacttttcttttttttttttttttttgagatgaaatattgctctatcacccaggctggagtgcagtggcacgatctcagctcactgcagcctccgcctaccaggttcaagcgattctcctgctccagcctcccaagttgctgggattgcaggcgcctgccaccaagcccagctaatttttgtatttttagtagagacggggtttcaccttgttggccaggctagtcttgacctcttgacctcaggcgatccgcctgcctcggcctcccaaagtgctgggattacaggcatgagccaccgcgcccggccaaagctcacacttcttatgattcagccttagatgtcacatcagttcattttccccacacttattagtgttagaagtcacaagcccacccatactcaggggactggcacacagaccccactctcaatggaaggggtgggacaccaccattcctgctgatgggcatttgggtaacttcctgtttgaagctattaagattgggctgctgtggccgggcgcagtggctcacgcctctaatcccagcactttgggaggccgaggcgggcggatcacgaagtcaggagatcgagaccatcctggctaacacggtgaaaccccgtctttactaaaaataccaaaaaaaaaaaaaattagctgggcatggtagcgggcgcctgtagtcccagctactcgggaggctgaggcaggagaacggcgtgaacccgggaggcggagcttgcagtgagccgagattgtgccactgcactccagcctaggcgacagagcaagactccgtctccaaaaaaaaaaaaaaagattgggctgctgtgactattctagtaggtgtctttggtgagcgcctacacgtgtttctctttttctctttagtatatgcccaggaggggaactgctggctcccagataccgtatgttcagggtcacacacacttccacagggttttccaaagcccttgtaccagcacgcactcccagcacctgtgtgactgctccagctgtcccacagtctcatcagttctattgctgatattttcattttagcttaagttatatttaataggaaaattaccgttgcctctgccccccgttcctgcctgtaggagtttctcgtagctgttgctacaggtggccacaaatctgtcacttaaacccacacaaattgatgtccttatggctttggagtcagaagtgtcaactgaaggtactagcagggctgtactgacctggtggcctcagggagcatctgtgctgcttctccaccttctagaggctgctgcatccctcgctccagccccttcctgacaccactcaccctcctacttctgttatcacatcctcaccttctctgtgttcagggctccctctgtctctctcttgcaagcacacttgggattccattgagggccacccacataacccaggagaatttctccacctcaatatccttaacaactgcagagcccttttgccataaaagttaccattcacgggttccagggattgtgacatgggtagctttaggagtgattattcctgcctgtctcccgctcaccagaacttggactttctctctcaacaggagccccctgtgtgggaatagcctgtctcaacgacgccctctataaggacctgcttcctcaaaggacctcatagtcgggtcctgcccctcagtgtccagtctgccttggctggaggggctgcaggggtgtgttggcgccacctggtggagacagggcatcacagcaggtgggagcccagtagaagcacaaccaaaacatgggtaatgtttaaaattttctggctaagcgctgtggctcacgcctgtaattccagcactttgggaggccgaggtgggtggatcacatgaggacgggagtttgagaccagcctggccaacatggtgaaacatcccctctactaaaaaatacagaaaaattagctggacatgtggcgcgctcctgtaatcccagctactcgagaggctgagacacgagaatcgcttcaaccccggaggggttgccgagatcgcgccactgcactccaggctgggcgatagagcgagactctgtctcaaaaaaaaaaaaagaagaggggaggcgaggggaggggaggggaaaagggggaatttgtttggagctgagacatccatcttctcctgacctcagatatttgcactcctggttatgaagccttcacacttggactgaatacaccaccagctttcccgatttccagcgtgcaaatggcagatcgtgagacttctcagcttccataattacatgagccaatttatatatataaattgggtcctccagaaaaacagaataaattatatatataattatacgcataacttaattaaattatacgtataacttagctatatatataatttattctgtttttctgaagaaccctactgacacaaatgttgagcatcttttcatgtgcttattggcttaataacttgtacatcttctttggggaaatgtctattcaagttctttgcccattttgtaactgaactattaatatttgtctttacattgttgagttgtaaaagttccttatatattctagatactagagccttatcagatatatttctgcaactattttctcctaatatataggttgtgtttttattttctttttctttttttttttattgagacagtctcactctgtcacccaggctggagtgcagtggcatgatcttggctcactgcagactcgacctgccaggctcaagcaattctcccacttcagcctcctgagtagctgaggttataggcacttgccatcgcacccagctaatttttgtattttttagtagagccgaggtttcgccatgttgcctaggttggtcttgaactccctgcctcaaagcgatctgtcagcctcagtctccctaagtgctggaagtacaggtgtgagccacagtgcccggccatctattttcaatagtgttttttgatgtacacaggtttggaattttgataatgttcaattcatccatttttttttttttttttttggttctttctactggaccaccactcttgagccctctaatccaacctccacgcggcagccagagggagctctctaaatgtaattactctttccctgctccacctgctcaaaacagtgtcacatttgtgatttaaaacagtatttctcaaacctaatttgcaaacaaagcaggtggaactcttcttgtatgcacagcatctgatttggttggtctggcatgggtctgggagtgagcacacctaccaagcggctgctggggtaacttgcgttttccactgatgatttcagcaatgtttccggtcccacatgctcctccagaaccttgtactcccccatgaaaaggtggagtccatttccccttcctttatttatttttttgagacgaagtttcactcttgttgcccaggctggagcgcaatggcgtgatctcagctcaccgcaacctccgcctcctgggttcaagcaatgcttctacctcagcctcccgagtagctgggattacaggtatgtgccaccacgcccagctaattttgtatttttagtagagacggggtttctccatgtcggccaggctggtctcaaactcccgacctcaggtgatccgcccgcctcagcctcccaaagtgctgggattacaggcgggagccaccgcgcccggctatttccccttcctttgaacctgatcaggacttgacgatggcatcaacatggtgagagtgaccctgcatggcttatgaggctgggttacacaaggcgatgttgcttctgactggctccctctcaggatacatgcccttggaacccatcctctaagctccttgggagcccaacttagcccatgtggagacaagacagggagagaaacagaggcacccccagccctcagccagcatcaaccgccagacaggagagcaaatgcgccaacaatgattccagctgaagcctcagacagcgtggagcagagatgagggatccctgcagattgcagatgcgtgagcaaaatgcatgctgtcactgttttgaaacaacaatgtctgggggctgtttgttatgcagcaatagacagctgtaacaatgctgttactgctgtattccatgaatgactgcactttgagtagcagggggctagatcactagataagccccatggcttctgtgtatgctatttttctacttttatatccttttcattcactttttttttttttttttttgagacagagtctcactctgttgcccaggtgggagtgcagtggtgcaatcttggcggactgcaacctccacttcccgggttcaagcaattattgtgcctcagcctcctgagtagctgcgactatagatgcacccccatgcctggctagtttccgtatttttagtagagacggggttttgccatgttggccaggctgatctcagactcctgacctcaggtgatccacccaccttggcctcccaaagtgctgggattacaggcgtgaaccactgcacccagcctcattcactttctttacttggctcatttttccttgttgcctcaattctcctctaagatcactttcctgacatttcagcctgggcctgttgccttctctgggtcccctccgcctcctgtgcctcccccatctcagccttgatccctcagattatacttcctctgtccccaccctgaccatcttggctgtccctggatagggatgggtatcttctcccactggtctgggagatctggaaggacaggcctggaaaagacttggtcactgctggaaggagctcagttagtgtggtgctgaggacagtacgggtgaggctggccccttcacccaaactcccactctcttccatagatttcacctctgtggcccaggccataggattagggcaactccccttaaacatcgagtccatcctccaagctgtccttttttttttttttttttttttttttgagacagagtctcgctctgttgcccaggctggagtgcagtggcgcgatctcggctcactgcaagctccacctccagggttcactccattctcctgcctcagcctcccgagtagctgggactacaggagcctgccaccacacccggctaattttttgtatttttagttgagacggggtttcaccgtgttagtcaggatggtctcgatctcctgacctcgtgatccgcccgcctcggcctcccaaagtgctgggattacaggcgtgagccatcgcgcccggcctcatgctgttcttgaatagtgagcacctgttacaagtcgccccaccagcctctcacttgtacccccctcatctctttctccccaagagacagaggaccctggcacttgtgaagcatgacccagaccctggggccatggcatccaacatcctcattccccatgacccctactgtctagatgtagctgccaagagacccccagactccccgggcctctgtctagagtgccaagacagagagagaatgccctgccgcttgcatgctttgtggggtgtccttcccccttccctggctgctaggcgtgacttcaacgttctccccaacccccaaacagcagcactgacaccagctgcagacctggctcaggttagctaatgaggaccaggctggggatggagcctgaacccctaaaccccagtcctgtaccccaccctaatcctggggtctccactggacaaaacgaagcagcttggtttttcgttgttattgtttttgagatagagtatctctctgtctcccaggttggagtgcagtggcgtgatctcagctcactgcagcctccgcctcccgggttcaagtgattcttgtgccgcagcctccccagtagctgggattacaggcgcgtgccaccacacccagctaatttttgtatttttagtagagacagggtttcaccatgttggccaggctggtctgaaactcctgacctcaagtgatttcccagcctcggcctcccaaagtggaagcggcttatttttaaggagaaaactcccgtggaaaggaatcagcacctcctctgtcaacatttcacttctctgaaaagactctcacttccaacagaaagtgctttgtaacacaacaatgaggctgggcgaggtggctcatgcctgtaatcccagcactttgggaagctgaggcgagtggatcacgaggtcagaagttcgagaccagcctgaccaatatggtgaaaccccgtctctactaaaaatacaaaaattagttccgtgtggtggcgtgagcctgtaatcccagctactcaggaggctgaggcaggagaatggcttgaacccaggagatggaggttgcaatgagccgagatcacgccactgcactccagcctgggcaacagagtgagactccgtctcaaaaaaaaaaaaaaaagaatgagaacatatggacacagggaggggaacaatacacacaaacaaaatttagaaacaggtgaaaataattttagtaatatttttactaatactgatatgctcaaaatattattatttcaataagtaatctaaaaattattgagatgtcttatgttcttttcatcatactaagcctttaatatttggtgtgtattttacactcacagcacatctcaatttgcagtccccatgtttcaagcactaaataaccatgtgtgtccggtggctaccatactggacagcgttgatctgaaatcgcatctgtatgcatcaccagcatatttgcagagatccccatctcagcagcacacctgaggctcatctgcgaaagcacctgcaacttctctacaacctcccacatcacctccaaacacatcctcatgtcatctgcaaacacacccatagctcacaggccaatgcctaaatatcattgcaggcaccttcagagaaagcacttactaaaggggtatacttgattccacatctgctttgacctgcaaatctcccttctcctttacatacatttgcatctcatttgtatgtcaatctaaatccactggcagagcctcagatcatcatctcaaagtcaggtggatgtggggctgggcaggcctccaggtgttcctcctcctgcttcctctggggctcttgatcctcctcctcttccttgctgctctcctcctcctcctccaatatggtgaccagttcctcccgcagcgcccccatctccagccccaggctgcacagctgtcccagcagctggacatccactcggcgcaggttcccctgccagtaggaaggggacgtcacagggatgccaccccagagagcaaggggtctctccaggacctgggtgagagcaggtcccaactcatgtcctggccacagcgcctgggcagggtcctcactgtgcccatggaccctaactgccttcctgcttctcagagtgtctcttgatctctaactcttctctttgtctctccatttcattgtccctgacttctctctctctgtctcctccctctcttatctatatctgtccctgtttccctttgtctctgtccccatttattttttgtctttccatgcccctgtctctctgtctttatgtgttgccatttctctgcccctgcctttggctctctttctctcgcttgccctctctctgccctccccaactttctcaaattcagtctgtctctccatctctgttcctgctctccgtctctgcttcccacctctgtccctctcttttgggatctccctgtccccacctctgttcccgtccctcactctatgtctgtctctcggtgtctgtacatgcctctcatgtctctgcttctatctctcagattctgtttttcgatctctggccttctctatttttgttcatttccattcattctcatttcctctctttctctttcccttccaaacccctcactcaccagctcctccctgatccacagcagactatcgcaggcacctccagtgtctgcccctgcagtcctgagggtctgaccagggatttccactggggagacctccctcagggcctgggggggtgggcccagccccggaggcaccagtccagcctgattcagctgcctccacagttccatcgtctctgagctatggctgcaaggagcaggaagtagcaaggtccagggtggcctggtcccctggggagctgtgtgcgtggtggagagtaaagggcagagggagtgggatgggggttcctgggaaaggtatcccaaagtccactcttcagagagaatcagctggccttgtgcttttctttttccttctgaagtctaacctcaactctgctcacagggttcaaacatagcctcttgcagaggtctaactccacccttccctgcctgtctcaggcctgacccctcaggggcgctcagtgtctgtagatgcctggcaccctctgtccttccacctgccccccaccaccacttctccagcctctcctcagcctccatttgacctctggcttgcccatagcttggtccttgcttgtcctcttggcacgggtcatcctagggctttcccaccagtgtgcctttgggggcaggaatggctcccaggggcaccaagacagcaatcccttagctggagtgcctgtgtccaggctgctggcctagggccaagcagccaattctgctgaccctggacttgcctatgggtatattatccctgttgagggtgagggcttctgctgtggaaaagtctgggaagcactgcaggcctctctcggccttggacccttccttcagacccaaggtgcatatatatacatatatataatggtagatcacgaggtcaggagatcaagaccatcctggccacatggtgaaaccccgtctctagtaaaacacaaaaaattagccgggcatgctgccgcgtgcctgtagtcccagctactcgggaggctgaggcaggagaatggtgtgaacccaggaggtggaggttgcagtaagccaagatcacgccactgcattccagcctggcgacagagcaagactccatcttaaaataaacaaatgaacaatatatatatatatgtattttgttttttgagacagagtctcgctctgtcatccaggctggactgcagtggtgcaatcttggctcactgcaacctccgcctcccgggttcaagcgattcccctgcctcagcctcctgaacagctggggttacaggtgcacgccaccacacctggcgaatttttgtatgtttagtggagacggggtttcaccatgttagccaggctggtctcaaacccctgacctcaggtgatctgcccacctcggcctcccaaagtgctgggattacaggcgtgagccaacgcgcccagccccaagtcccttttaccatagaaagtaacatagtcacagtgcccagggattcacaggtatggggagagggttcgttattcagctgccacacccaccttcctaaacctgctgcccttccagtttcctcacgtgcacagccacgcccgtctgcttttagtttctcaatctgttggcttaaccttcaaaacaggcccaggatttgagcacttctcaccattccctctgccccatccccattcatctcttgcctagactgctacagcagcctcttttactggtcccctgcatccacccttgccctctaaggcaagggtccccagtccctgggccaaggaccagtaccagcccctcgcctgctaggaactgggccgcacagcaagagatgagcagcgggtaagtgagcattaccgcctgagctccgcctcctgtcacatcagcagtggcattagattctcataggaggcaaaccctattgtgaactgtgcgtgcgggggatctaggttgcctgctccttatgagaatctaatgcctgatgatctcaggtggaacagtttcatcccaaaaccatccccaccccacccccgacccccagtctatggaaaaattgtcctccacgaaaccagtccctggtaacaaaacggttagggaccgctgctctaaggtacattctccacctggcagaaataatctttacaaaatgtaaatccgattttgacactcccttcttcccactgtgaatagaataaaaccctaccaggcctgcaccgtcagcccctgcccacctctcaacccagtctcctatctctgtctgcaagctggttcccacctcaaggcctctctgctctagaggctacctctccctgcagcgcttttcccctagatctttgaatggctctttccttatcattcacttctacttcaatgtcacctcttcagagaggcctttgctgatggccctacacccagtcacttttttttatctgcttctcatcaaaattgccttgctgattcctttgtttcttattcatcctctcccacatccatcctctcccagcccagaatgttgacttcctgagagagggactgggtctgtcctgctcaccatggtaacctcggcatctagaacagtgcctgccatcacgtggtaggtgctcagtaaatattcttggaactaatgaatgaataattctatccacaagacttcacaatggctcttcatgctgcgatctagctttcaactccaaactggtcttgagatctcacctcagtctctaaccttgacatctaacctcttcacccactctcttacctgaccctaatttttaaaaatgacgtggtcagcttttcagccccctcattccctgtttttaggaggtagtgagtggaagctggaagaataagaaagcttggggagactgcaattgcagtcaggaaagaaaggtactctgccgggaagaacaccccatcttctcctagggaaagattgtggagtcctggggtttgttttgtttttcaattttttgttttaagagacagcgtctcgctctgtcacccaggctggagtgcagtggcgcaatcacagctcactgcaacttcgacctccccggctcaagtgatccccccgcctcagcctcgtgagtagctgggaccacaggcgtgcaccaccacgcccggctaacattttattttttgtggatataaggttgccctatttctttgtggagataaaggctcccctatgttgcccaggctggtctcgaactcctggcttcaagcgatgctttcgcctcggcctccacaaagtgctgggttcacaggtgcgtgagcccgacctgtgtctcgttttgaagctcagggagagggcgctgtgagcaatccctaaaccctttaagagtaaaaagtgcgtgcacctttaagaggacggttagaaaacgcggggcgtggccacaggagaataagttcgcgctgaaccaggagcgtgggataagaccggccccttccggttacgaaaccttagcaagatggcggctccctgggcgtccctgcgcctggtcgcccccatgtggaatgggcgtatcaggggcatccatcgcctgggtgcggcagtggccccagagggcaatcagaagaagaaaaggacaatactccagttcctgaccaactatttctacgatgtggaggctctgagggattacttgctccaaagggagatgtacaaggtgcatgagaaaaatcgatcttacacctggctggagaagcaacatggtccatacggcgcaggtgcctttttcatcctgaagcagggaggcgcagtcaagtttcgagacaaggagtggatcaggccagataagtatggccatttctctcaggagttctggaatttctgtgaagtgcctgtcgaagctgtggatgccggtgactgtgacatcaactacgagggcctggataacctccgaacctccgcaggctggacatctcggacctccctgccgtgtccaaccctggcctcactcagatattggtggaggagatgctgcccaattgcgaggttgtgggagtcgactgggctgagggcctgaagtcagggccggaggagcagcctcgggacacagccagccctgtccctgcctagcctttagccctgtccccactcacgtggcttctcagcgggctgcatggaatgtctggtagctcaccacacttctggcttccatttgtcttcactcaacgtcagggtgggggagtggtgctggccaatcacaggagagagcgtgagttcccagtatttattcctggctgcccttggctaaaggtcacagctcctgtcaccctgtcaggcagccctttccatgcccctgttcaggcctggggaggtaaaggctcaggctgttagtagccgcagagagccacactcaccttgtcaggagactcttctcaaactgtccttatgtgagtgcactgccatttcttgcagggaccctgactgacacaggggctactactgacactttacagggatggttctcccccgtgcagggccgctgtgcccactgcaggacatgcagcatccttcgccccactccactcactaaaggccagcgcaccccaggccccatagtattgctggttatggatttattgactttatgttccaaattcagctttttcagttggctgttttttgaaaggggataagctttgtcagtagagggcaccgaacaggcattataggaggaaaggcgcctccttcgtggttcttgttggttgtgcttctgcctctggacgccgcagtgcatgtggcttccccagcacccagctcctgaagcaccaggcggtcagcagctgcccttggcaccctccagccctcagaagttgcgtaggagacacagcgcctccactgaggcacctctctgggaataacgttccccagcaccccaaatggatttccagtcaattcagaagcattttaccagtgaagccctcattattccagttcactgttaaagccagtaattctctatattaaactttccctgttcggtttatactccggagtataaaccgaacaggattatattatctgaagctccccttttgggcggaatgtg

SEQ ID NO: 735308 - DNA, 188264 bp, Homo sapiens
ctccaaggctgagggatgaggagacctgctgaggacccagggccttatctttccatcccactccataggtcccagtattgactgatgctgtcttcacctcctagcctcacttttaaccttctggcacccgcccaccactgtccagttcactattgaagccctgccgtccagtgctgcagagggaaaggatgttcttctactggcctgcaatatttcagaaactattcaagcctattattggcacaaggggaaaacggcagaagggagccctctcattgctggttatataacagacattcaagcaaatatcccaggggccgcatacagtggtcgagagacagtataccccaatggatccctgctgttccaaaacatcaccctggaggacgcaggatcctacaccctacgaaccataaatgccagttacgactctgaccaagcaactggccagctccacgtacaccgtgagtgattcccccatacctctgggtgctggcggtcagttctgcttcacacacatgagattgtcaggcctgggctgtgcctgcatccccctctgcattttgtcccgtgttgagatttgggcatttagtgcaggacacacacatggtaggtaaacttcaacagatcagaattcctttcctgcatccaggccctgcagacactgatggcgggggcgggggggcctcagcagggggaggtcagtctcagccaagcaccccatgccctccccatgaacctgaccctgagaaagaccctggagaactgggtcagggcctggcctgagggcgtcctgggaacctcacaaaagcccagcctcaggactcctgactccgtgtgaccccgggaagcctgtgtcagggctggggtgtggtctcctgggcagggcttactgggagcaaggatttaccagatgtctgcgggctgtggttcctgaagcttctcatcagtgagggctcagctcccagagtctcatctagacaaggacagagcctaccactttccctgggactcagcctggagagggcagggggacaggattactagggcattggccccctgaatgaggagcttaagagatgcccttgggcagtcagtggcccaggggtaggaacagaggggagaaaatgttcctggcagcttcttgtccaccggggatcatgcccaggggtgctctcccatggaggcaaataacagatgctgttgatgtgaacacctcctctgtgccaagcttcatgtcagatcctgtgaataatttaaagttcattcacagacaaagtggcaagcctcagaccattttccatttacatattgtatggaggggaaactgaggcacagagagatacagacaccggccacggtgggcagatcgcagctggcagagtcacatgagggctgtctgcagctgctgccacgtcctctccttcatccctggtgccttactaggtgtctgtggaccttagaacagccactggttcggatgttttcttcttaggtgtctacagctcggagggggagattctggtctggagagttatgagtaaatacagaattaatcagttttttcttaactaaatcacctgcctcaacaatcagtcagtgctggggaagttcaggcctcctcgctcaggtccacaccccgcatctctggacatgaaatggcttcgtgtgttttctgatgtgtgggtatcattccaacaggaggataaaggggaggactttgctttctctccccattcacaccctgcaccagccagggcccagtgtgagacacatactccgtagttctctcatgaaggagggagggaatgaatgaaggaatgatctataacctcttcagagacagagacctggatacaagatcctaggaggttctgggcccaacgtgagacacacactctgtagttctcttatgaaggagggagggattgaatgtaggaatgatctataacctcttcagagacagagatgtggatacaagatcctaggaggttctggccacacctgttttctgtccctctagagcctaagacccatgtctcattcatctggcccgtttctcctaaatctgcccctgggagctgagtctcatctgaccctggggctgcagggctgtgggaaggttttcaggggagggatcaggcttgcgggtagtcccacacgtttgccttacaccctggagctctacctggttctcactatgaatatcccataataatcccccctatcctttctggggagtagaaaaaaagtaaatatttaaaaatatgccagagcatctgttcttcttagcaagttcagatagttattagttagcaggaataaatcgttattttaccagagcctcacctgctgggggtttatgggagcctaactgactgaggggggtgggaaatatccaactccagccccctctagccatcatgtcccacctaaaggagagaaaaaactgagaggcacttgtgacattcacagcccagggcacagactctatccaggaccacagaacccctccctccccccactcaccaccgcatcactgaacgcctgctcacccaagttcctgttgcccagtacatcatgtcctggctttcaacaaaaactacaagacagactagaggcaaaaaaaaaaaaaaaaaaaatgcagttcgaaagacagaacaagcatcagaaccagatgcagatgtggcagggatgtggcagggatgttgaaattatcagaccaggaatttaaaacaactctggggccaggagcggtggctcatgcctgtaatcccagcatttgggaggccgaggcaggcagatcacctgaggtcaggagttcgataccagcctggccaacatggcaaaaccccgtctctactaaaaatacaaaaaattaggcaggcatggtggtgggtgcctgtaatcctagatactcggaaggctgaggcaggagaattgcttgaacctgtgaagcggaggttgcggtgagcctagattgtgccactgcactccagcctgggcaacagagcgagattccatctctaaaacaaacaaacaaaaaacaatactggctaatatgctaaaggctgcaatggaaagcatagacaatgtgcagaacagacggatgctgtgagcagagagatggacaggctaagaaagaataacaacagctactatatctatctatctatctatctatctatctatctatctatctatctatctatatatatgtatatatatgctagagatcaaactcactgtaacacctggatctcagagtggttgtgaggatgtttattaggagattaaagagattaaagcagagttatacacagggcgagagctcaactgatgctatcaactagtattcttatttttttgatgttgttattggcaataaaatcaggaacaatgcagtaaaaatttggttttatcatgtacgagttctgtgaccttccttgacttactgaggtactgtaagtctcagattctaactctgcagatggcggtgatgcccctctccctcaaggtgatgtgaggatgagatgagctgtaggtaggttggtgcccactgtgcctggcacatggaaggcccctgaaaatagtcaatgaacatcatccccgctcatcagcatggagttgacagtgagggctcgctctctgtgacaatcatggaatggaaaagaagaaacaagaggaagactgggcgcagtggctcatgcctgtaatcccagcactttgggaggccgaggcgggcagatcatctgaggtcaggagttcaagaccagcctggacaacatggcgaaatttcatctctactaaaaatataaaaattagcctggcatggtggcacaaacctgtaatcccagctacttgggaggctgaggcaagagaatcgcttgaacttgggagatggaggttgcagtgagccgagattgcgtcagtgcactccagtctgggtgacagagcaagactccatccaaaaaaaaaagaaaaagaaaaaagcaacagagggaagaggtgtgacatgagaggaagaagggatttaaaggtacaggagcagggcgaggtgcaagcacctgtgggagaatgtaggagttggtacatcccagtgtgtcaagtctgagacacagaaaatggtgcaaccgtggagagcaagggagtcagctatgaggacagcccaacagaccacactcaggctctggagcatttccttcctccctgactatgcccctgccctgcaatgccccttatggtttcccttggaacaaacttgggccttgtcccctttgccttcccctttctgcagaaaacaacgtcccaggccttcctgtgggggccgtcgctggcatcgtgactggggtcctggttggggtggctctggtggccgccctggtgtgttttctgcttctctccaggactggaaggtaccgcagcttttccccagcctcctcccacccctaggctgaccccagtcagggaggagggagaccccgccctgtattcagggccaggctttccgcatcctcccaaggaatccttccctctcattccatggctcctcccttgccagctgctgatcctaggctgcctcttcctttatgaatgtggcacagttaaggttgcacccctgagtgctgtcctagttccctaacacagcaaagccacagctgcctggagggaggaagggagggagggagggagggagataagacgggagtgctcagaacctggtaccttctgctgttcattgaatttacccacccagtgaggagggatttgcaggcttgagatccatggtgggggtcctgggcatggtcacgcagtggggagtggcaaagcctggacaggctgggtagggtcagcaccccatcgtgattgatgtccctgaggtgtgagatgggagaacctggacctcaggacctgctgtcctttatgtctcttgccaaggggtggagagagagaggacaaggccattgccccatttcagcatctccaggcctgaaaggagggtctggccatggcagggatactgagttctgggagaatatgatacatgctccttgcctccccatgcccccagctcccccagtgtcctgcacacacagccggccctgctttccctctggggccttgacccttcctctcaggcaaacgcaggtggtctgattccctccctgagtcctcagtccctttcctgggtccctgggtcaatgttctcctcacccggcatctgcctgggggggtccttcctctctggccaggacagacgtgactgcttaaggcctatcctcagctccccgtcctcggccgctcctaccacgaaactgatggagacaggaggccttcactccagtccttgaaaatggagtcccttccttgtcctttattctgcccctaaacctgtgatttctccctgcaccctcatgaataatcctgacctttcctagggccagcatccagcgtgacctcagggagcagccgcccccagcctccacccctggtgagtgtcccttcagcccaggtgtgggagcccctaggcctgccctacggtgtccactcctgccagtcaccccctgggggcctctgaccctttctttggggctgcaaggaggatgtcaggaaacatgacacaggggaccccgactgtcttgttcagactgatctgtgggctctgggtcgtgggtcacctcctcgacctcagctgctcaggtctcccctgggaagaggctccctctccctgattctctgggagctgaggacccctacactctcctgcaggaggggcccaggctctcctcccaccctgctgctcactcctgtctctgtccccaggccatggtccctctcacagatccaccttctcggtaagcctgttccctccccagcccttttctactggggtcccaacagtgcaggctcagggcagggggaccatcaaccccacagcacagcactgacccacctttccccagaacagtcaggtcaaagtgagtgcctccagccaggatccgggcctctctacagggccaggaccacccacgccatgtgctgacccctccccgggaccctctacacctgaggagaaccctggagtccagcaggtgcagaatggacactgggaccatcagtcagaggcccacattaacaagggtgcggggtgggcccagccaggacaggggtcagggtgttgtgtccacactgggaggctgagctcaggggcagagctggtcaatcctgaggggaaatgagtggaagtggaggcagggaagtaagtcctggccgatcagagacaggaaccttccaggctgggcttccgtgaccctccctccctgtcccctgacatctcctctctcccctgcccaggcccctctacccagccccagaacagccactcccatctatgaggtgagtgtgggccatggatgttctggtcccgcaggctccaggggacccaggatctgcccccaccagcacctggctgagctcagattcaggaaaatgcagtgaaaatgagaacaggtggtggtgagcagaggagggaggggcctgggaacagggaccccctgagcacagccaggttcagccccagagaagccctgggtgggcccagagcctgggagatgccagacactgttctgagaaggctacaggggttgaggcctcttctctgtttttacaggaattgctatactctgatgcaaacatttactgccagatcgaccacaaagcagatgtggtctcttaggttcctctgggagctgctcttgtgggttgatggagcgtccccaaagctcccagccctggggacggggaaggacatggagcctgagccagagaaccagctctgagtcctgaggagacacaggcctggggacagggagggatgggagtccctgctgaatatctggagaccctgacaggttgccctgggctctgggtgggccgggacaaaggcctctcatcaccacaggaagcgggggcttgcaaggaaagtgaatgggcctgtggcccacccggggtcaccaggaaaggatctgaataaagaggacccttcctctcattggctctttttctgctcacgggaacttagcagaaactcacctgaaactccgtgtccattctctcccgggtcacacagggaaaatatctccaccttgtctcaaccacagtctctcttccctgggaggcagaaataggggttgggagtcaggctggggtgggccctacacaggaaagggcaagattcacatgagccctgcccagccagccgagcgctcagctgtcctcacactaccccagggaccaaggccatgcacagccccagcctgggtccctctgtgaatgcatgtggggtctcaggagcacagaagatggggccatctgatgtccacaaaaggtgagcaatgcgggagcaaccatgggtggtataggttgcggctgtggcccctacgcagcctccagtgtcctgacccctgctgccctcttcacccaggccctggaggcccagtctatcactgtcctccacaaatgaacttacctgtccccaaatccaggatcctgtgtgcttatacctggccactaggttctcctctgtcccagtggctactgctcaggacatctttatccctggtggggcacagagaggggctgtcagagcaaccaagattaatacagacgcataattcagtccttgagcactacccaggactctggcccctcattgctcatcagttcccactttaccccctggcatggatctcactgagcaagccaactctttacacaggagcatccaggtcagaggtgcaggactcccccatctaaagctcatgcaggctcccatggcgatgggacaacctgtctgctcctctccctggcccacagccctatctcgcctgcagctcctccacacacctgggacagcagttctcagcccttccctgagggcccctggaagggtgatgatctcatataggttcacttgaaccaggtgccaccttcccacaagtgagctggtgcctgcactaaagcacagagccacagttcccaagagtgttctgccactgccacaggtcccaagagtgttctgccactgccacaggttgttcgtcctgagatgagaggtaagaaaacaacccgcaatgggttgttttatatcgggatttgcatcaggatttagctctaaatgacccctgatcccacctgcacacagcgtcagatgagacaaggtgaggcctctttagttttctgttgaggctgtgacaaattaccacaagcttagtgacatagaaacctgaaccaaagtgcccacatggctgtgttctttctagaggctccagggaagagtgcatttcctctccttttccacctcctagaggcctcctgcaaccttggctgtgtcctctttctccatcttcaaagccagcagcacagcatcttgaaactattctgtgccctgcttccatccccacatctccacctcctcccacctccctctctcacttaaaaggaaggagccttgtggttattttggacgcacctgggataaaccacaacaacctccccatctcatgatccttcctttaatctgtaaagtgtcctttaccacgtgacatgtccacagatctggggatgaggatgtacacatctttgagaggcccttgttctgtccatcactcctctcaaggccatcttctcatcatcgttcactacaaactacacatgggcacctggatgggttcatcatgactgtggcgtcagttcctgcattaacatccccagcaccctccagatcctgagagagggagacggagggctctccatgcccctagtacctctccaccttcttcttggtgacatgcttagttgctaagaataacagaaagcggaggtgactgaaagatcacaactcaccggcccttcaatagttcgtggacatcagcaccacggacagtgactcagtgaggctaatttccaggtggcagcagggagcatgcagataggagggaactgcaggaaaagctgcccattctattctatatgagaaagagtgtaagaaagaggaagctattacagggataatgctattcttctctaatccataaattgcgaaacctttgcatgtctggatatcatggtttttagcacatctgctgccactccctgcagggctgattgctgcatccaggatgtggtctcttggggggctcacagcctgctttggcctcatggtgagtctccctgcccctgacactcaggccactgtctctgcctacaacatggtgggaaccttccatgattaacgtctgattctctgtgcctgacctttgaagcacatccatcactcagcctggagcatccgctgagctcagcatcctgctcctccatccccagctgagcccttgaggagatgcttgagaggatctcctgggctcctctgtgagctcctccaggctgagccttgtgcttggtgtcagaggcctttgccatctgcttgttctttccataggcaaataatcctcctcagggacaagtggggcctgaagatctgtctgaatatctatctatctatctatctatctatctatctatctatctatctatcatctatctatatgtatgtatatatgagaatgctttattaggcaaaactgcatactatgaacatgctttaaaatgcaacaggatgagatgtgaagacataaagaacaagtgtgtagtgacacatggctatcagaacacactgaagaatccacaccgcggccgagagcagtggctcacgcctgtagtcccagcacttttggaggctgaggcaggcagatcacttgaggacaggtgttcgagaccagcctgaccaacatggtgaaaccccatctctactaaaaatacaaaaaatttagccgggcctggtggctcatgcctgtagtcctggctgttcgggaggctgaggcaggagaattgcctgaacctgggagacacaagttgcagtgagctgagatcgcaccactgcactccagcctgggagatagagtgaggctccatctaaaaacaaaacaaaacaaaaagaatccacactgcttccccgcttcactttacccagaaaaggaatgttctaggccacttcctcttcagcacacatccccagggaactaaaataggttcacagtcacccccatcttcctcattcccatcacctcttacccacagaggcatctctggtcctacagatccagccctgccttcaagaggcacaggtccaacccatccagtgtccctgctagtcacacacagcactcagggtacaatggagggcttctgtgctttggatgggaacaaaccccacctcacattcccacacctgagaagccaccagggtcctctctgtcctgtcctcacactcaatgtctgtcctgggtcacccttgtcatctctcctggaaataggcatggctcctgacaggtaggattgaggctttgtcttttcaggagtccctcccactctgagcacatgaaactgctcagctccatgcaaccctctctcaccaggggccttgttctctgggtccctgaatacctgggtccatgccatgtacattttaagaaaaatgacagtgactctcaccctgacatcctcacccaaggcacgtgtctgacaagaatcaccaggtgagatacctgtggctccacacacctgaggcttcactgcgcaggggtgtcctcatccctctcctcccacccctagggacagtaagcaccacaggctgccttggaccaccagctccccctcccagacacagcctcagatctatactgacatgctacatggagaggctctgatgaacagcaggtattaggaaatcccaccgaaccaggtgccacttgcggccccactcctcctcatatctgtgactgggacagacacacataacacacctctgttcaccgcccagcccccaaggtcaatcacagtctgcttctcccctagatccactgctccccatgtcttccgtcctcagctgcatcctgggtggcctccttgctgttcttgtaccccagaggcaggttccaacctttgtgatgttgcctgcaatgcccaaactttcccttccccttccccttcccttttcccctcccccttcccctccccttcccctccccacccctatcccttcgtcttcccttgtcttcccttcccttccctataaagccaaacatacccatccacctaccttgtggtcaaagtcatcagcctcctgctccactcagtgttctctgaccctgcatatggaggtggtggcccctcctagaacacccaccactcactgtcagccttgcgtggtaatcacagattttgcaggggttacctgtgttcaggtgtgtcacctgtggaaccagaactcttggaaggactggcagagggagctgcttaggatatctcagggctcctggcatctggtctaccacagggctattaacaacagcacttagggacaaggtggaggatggacggttaagagggtaaatatggatgatgtgtgggcaaagaataggacacaggaacacatgcagtactcaaataattatgccaagaaaggtgaggacatggagatggacattcccatatacttctgatgggactgcagtttagtccctacagcaacattgacctcatcatgtttaacgcgcacacgctctgaccactatcctacttctgaaggcctccctgtgctgtgagctctgagaaggccaagcttgcctgttctgtctctgctaaagccagagaccagccaatagcccagcacagggtacttcataaatacatgttgaaggaatgagctccaggaacagtactccacatggtagagatgtgtgtatgaggatgttcactgcagaaggtcatgtcaatgtgacaagtgacgagcagcctcaaatccagcaacaggggtgtgggtaaaagatcatagtgtagccatgcaatggaaccaatgaaaaaaccacaattagagcaaatccacatgtattaataaaggaggtgccctccatacatgctgcacctaacagaatgttgccaaataagaatgaaaaatgatgatatttgggctgtaaaaactagaagtcagctaaataagaatgcatcgaaagtatttgtgaatgcttacaattttataatgccttggcatccgttttggatggaagttggactttctcataccagaagcagggctcagtcacctttgaaatagtttccagttctccacctccttccagttcctcagtgtgattgatcagatatctgatttatacaactgcctcctggtgacctcctccctatgggacttccggatacagcccgtatgactgccccactgaccccacaccctgcctgctgcagtgaccacctctaattacctggatctcatgtctgcttgcattaaatccaccaattaaaactccctgaggacaatctgtttgaataatattctgtaccctaataaaggccttgacccatgggttccccctctgtcctccccatactgcccctgacctctgtgtgtgtgtgtgggtgtgggtgtatgtgtgtgtgtgtgtgtgtgtcctccagacagggcctgtatcccccaggacctgtaagtaataaatctttattttcatcttatgtctctcgcaatcattggcaagagctctgcatcttaaagatcgcaaatttaagaaattggtgtagtcggcacaatagagtacctcttctgtttagcacaagatatctcggagctgctgaggcttttaacatcctcgccggtgtggctgcctcactggtgaggccgttctgttcagtgcaattcagttgctccactgtgtgctgctgtgttgctgctgtagagtgctgccatgttgttctccccaaattgttaccgagtaggaacctgtaatgtgctcccaaggtggtctaccccatgagaagggggattctccatctagggcaagggctaggtgtgtttctggaatcctaatagggaaggcatccacagagggtgaactccactcctccttagagtgaggagtgacatttcccatttattttccccatggaggtgccatgtattgactttttctttcactgtcccaaggttgagccaaggtgagctatggagaccagggcaagataccatttctgttagcaaagcaaatgggtgacaacgtgtggagaagctgtggttctcctgatggatatagcagagtgccatttagtaaaatcttgtcaggaggctgcccctggttagaccggcagtgtctgtagtcactaaggtggatgcgaattttaggccctgggccatggataatccctgcagacacagccgtggcttcatgtgatggggcaatcccgggctagtggctcccttgtttctgcatttcttgctgtggttgcacaatcaacacctcaggggttgattgggtcaccttggaaagagaaacagctgcctaggaggctggtgcacatggaggccaccctcaattttattctgctaacaagttgtaagattaaaacaacagggggctttgggtaccatcaggaacttgtcaagtaaacatccaaagacagaaagaagaaaaagaaaaagacattaaccgtctagaaatacaagccattttaaagattttgcttaaaagatgcgcttgggctgggagcggtggctcacacctgtaatcccagcactttgggaggccaaggtgggtggatcgactgaggtcaggagttcaagaccagcctgaccaacatggtgaaacctcgcctctactaaaaatacaaaaaattagcagggcatggtggcaggtgcctgtaatcccagctacttgggtggagaatcgcttgaacccgggaggcagagacggcagtgagccaagatcgcaccactgtactccagtctgggcgacagagtgagacttcatctcaaaaaaaaaaaaaaaaaaaaaaaaaagacgggcttgtttcgtcgttgtggagtcatcccagagagaggctactccctagagtcactgaccacctttcctcctccatcttttcctcttatcattctagagacagaaaacaagaatctcagctttaggtggctaacctcaccccccaagaaaagaaactaccactttgattgactacaaatccaagaaaaataaaagagaaactttaaaaagtactgagcaaaccacaggtctagcaaacataatgctagccctaggttacttattcatttacaacaaacccctagatataggaggaaaaaataaaaggtaattaaatatatacacatacaatattttaatataaatatataataaatagttaaattatgtatgtataatatgtaactaaatcaaagtaaaatttcatactttgattctattggaaattcaaaattcatttattaacttatatattaaggaatttatgtaaaaaaagatttttaaaagggcaccaatttgcttttgtgtctctacaacataggatctaatttaactttacatttgctaaatacactaattgacaaatattcatggatttaatcaatactggggctcaaattgtagccacacgtgggaatcccataaatttaaacactctgtccctattatcttgagaagaaaactaaatataaaattgaaaaaaacaggtatgtctcaatttacctgtaactttgcctaaatttcccggagtcatatacccattgctgtaaaacattctctattggacataggtgctctgagacaataaataaaatagaagtgtttttggtacttagacattggcttgacaaaatgggatcccatgaaacctcagttaagatagtgaatacggcccaatgtgagttgaaatggggcctttaaggattaaaacttattacatgaaacctagtaagtaatggggtgattatccatactgcttctccatttcatagcccaattttgacagttgtcaaatctggaaaaaacaaacaaacaaacaaaaaaacccctgggaatctgttgcctcacagagacacaaagtagacatcaaaattgtatatctcagttccagttccaaaatggtggcatagaagcaagctggctttactccttcacacagaaaaccaaaaacaaatatacagcaccaaaattattaccagatatattccagaactcaaatatgaaaatgaaacagttttcagagccacagagaagtgaaaaaaactcccgacagatgacaaaagaatcagatttccccatctgtaatgtccctccctgccccattctgcctggtaccaggtgtgtggaaaattttaccccaactcatggtttctacactgggaaatgtaagatcaatgcgggcaaccagtttctgcacaatcctgggttccctgtccctgccttaacccacaagaagcattgtgagtgcccgaagggagaaatttccctgaggacagtcaaagagtggggaggcaggactaccatctccttccctggaaactctgctgtgtaactcagccaagggagacatgaaatcagactggtgtttcagcagctccatgttgtagtaggtttgtttcacaggtatcctgggcatggacatctagccagctttcccacactgccaggatatcccctttgggacctccctcagttaggaagggcacactctgatcatttactagggccaaggtaaaccctaaaggtaacttagagatgaaaaggaggtagtgacctagcagtaaagaactctaagaaaatctatccaataaaaatcaaaacaagccagacaaagactaaaataaataatgaatccttcaatgtaaagacctggacttacatccacaagaaacagtaagcaggtaaccatgatctccccacatggacaaagtgaggaacaagtgactgatcctgatgagatggtgatgtgtgagctctctaatcaagaattcaaaactgcagttttaaggaaactcaatgatcttcaagaaaacatggaaaagcagttcagaaatttatcagagaaatttaacgaagggattgaaataatttaaagaaaacaaacaggaatcttggaattgagaaatatatttgctgaacaggaaaatttattagagtctctcaacagcagaatggatcagaggaaagaatcaacccaaataagactcccccaaggcataaaataatcgaattctcaaaagtcaagggcaaagagaagattttaaaacagaaagagaaaagaagcaaatggcataaagaagctccaattctgtggcaacagattttcagtggaaatcatacagaccaggagggagtgacatgacattctcaaaatgctgaaaaaatattgacatttgagaatactttatccagtgaagttatccttcaatataaaggagagagaaagtttcctagacaaacaaaagctgagataattcacaccatcagactagtcttcctgtaaatactaaagggtaaatactaaatacttcaatgtgaaagtaaaaaaaaaaacactaacatgcaaaacaaccacaacaacaataacaacatttgaaggtataaaatccactggtgaaattaagtacgtagacaaacccagaatactcaaatagtaattgtggaaagtaatccaatcataactctagcatgagtctcaaaatataaatctatcaaaaacaataatacattttaggaggccaaggttggcagattccttgaggtcaagagttcaagaccagcctggtcaaaatggtgaaaccccatctctaccaaaaaatacaaaaatttgcagggtatggtagcacatgcctgtcgtttcagctatttgggaggctgaggcaggagaattgcttgaacccaggaggtggaggttgcagtgagctgagattgcactactgcactccagcctgggtgacagagggagactctgtcttaaaaaaaaatagctacctgtttggagaaaggtaatataaaatatgtaaatagagacaaagtcaaaatttgcaaaggatgaaattaaagagtagagtttttttggggggttttctgtttctattattttatttgtgatctaagataagttgttaccttttcttctcttgaagatactttgttatatctatgtttttggaagtcttatggtaactgcaacgcaaaaaatctatgatagatccactgaaaataaaaaacaatgacttaaaacatactaccagagacaatcaaccacaaggaagacagtaaaaaatgaagaaaggaagaggggagttacaaaacaaccagaaaacaggcaacaaagtggcagtagtaagttcttacttaaaaatattgaacactgaatataaatggactctattctccaattaaaaggcatagagtggctgaatgctgcctatatgctgcctacaagaaaccacttcatgtaaaaagatacaaatagactgaaagtgaagggggtggaaaaagatatttcatgcaagtggaaaccaaaagagagcaggagtagctatactgatatgagataaactacaaatcaaagactataaaaagagacaaagaaagtcactatgtaatgataaagcgctcagttcagcaagaggagatgccaattataaatatctatgcatccaacacttgagctcccaagtctcccaagtatttaaagcaaacaatagtggatctaaaaggagagatagactgaatacaatattaattaggggactttaacaccctgctctcagcaatggccagatctttcagacagaaaatcaacaaggaaacttcaaagttaaactacacactagatcaaataggcctaactggcatttacgggacatttcactaactatctaactgttacagaattcacattattttcatcagcacatagaacattcttcagaacagaccacatcttaagtcccaaaaccagtcagaataaattcaaaaaagtttatatcacatcaagcatttgttctgaccacaatggaataaaactacaataaatgaataactttctggacacatacaacctaccaagatggaagcatgaaaaggcagaaaaacccaacaaaccaacatgaaactgtaacaaaaggaaaacccaggaccgaatgacttcactgctgaattctaccaaacatttaataagaactaaaaccaattctactcaaaatgctttaaaaaattgaagaggatggaacactttcaaactcattctacaaggtcagcattatcctgataccaaaaccagacaaggacaggacaaaaacaaacaaacaaacaaacaaacaaacaaacaaaaaaacactacaggattgcttgaggccaggagtttgagatcagcctgggcaacatagtcagaaccaatctcttaaaaaaaaaaaaaaagaaaaaaattagccaggcatggtggcatgtgcctttagtcctagctactcgggaggctgaggtgagaggaccaattgagcccaggaggttgaggccgcagtgagccatgtttgtgtcactgtactccagcctggggaacagagcaagatgctctctcaaaaacaaaaagcaagctgggtgtggtggctcctgcctgtaatcacagcactttggaaggctgaggtgggagaactgcttaagcccaggagttcaagaccagtctggacaacatagggggactccatctctcaaaaacaaccaaccaaaacaaagccaaaaaagaacataggccaacatcactaacaaacatagatgtaaaagtcctcaataaaatattaacaaaccatgtttagaaacacatcaaaagagatcattcactatgattaagtgagattcatcccagggatgccagtatggctcaacatatgcaaatcaataaatgtgatccatcacattaaagagaaccaagaacaaaaaccatataatcactccagcaagtgcagaaaaggcatttaataaaagaatgggttgagggagtggagcccatagtcagagcagcagtggtctgggattttggaagtagaaagaagggcagcaccactggccaggaccaccagggaacacccccataggccctgggtgttgtgctccagggagggttccctctggagttattaatcttggtgtccactttgcccagctgcccctcacagggtcagggaggatgaagggaaagcttccttctaatgaaagttcagggactcacagttcctagagcctgtagggagaggaagatcttcgaggaagagcacctgggcattggggcgtttgagaggaagatctatgccaggtccaagtggacaacctgtggactctctctccagggacatacgggtatctgggaatctcctgtagcttaaagaggtaaagacctctccctttagcctgaggactggaggatgctggttcaggtgaatgagtcctgcaggggctggtacaggcctggagggtggtggtgtccagggccttgggttcacccttagcatgattcaggccgggcggtgtttcacatgagcaagagggcctgggttcattgcttcaggacaatggtgaaatctcatggtggaagaaatcttgtccttgccagtgcccagctttcatttggtcttggcccagagtgtcctccctagagaagactcttgtcccttcttcacactgcccttcagggatatgccagccttatgggataagatggggtggagactgtagatgtgggtgggaatctctccacagagtgctccttctctcagcggttgcaccttgtctcagggcttcagcttgaaatctgggatctccaagcccttccctccccagtcctggccaggaccacatgggcagatgcattgtgtgaagtgcatttcatttggggtgtcctctctgcatggcaccctcccgttgattctctttgcgcatgtcagagtgcaggcaccatccacacctcctgctggaggagggacggagctgttgactcctgagagctgatcatgtgttcccaccctcacacacaatcatggtccatcctctgagggacatgtgttgccaccactgtggagatggtgcaactgacagtaacaaacagtaaaatctggtactgaatgggaccttaagccaacaatgacaatgtcattccaaggtgtttcatttttattgattcaatgcaagtcacctgatttcattgactattcacaatagctcgataaagtaaatgcatcatcaccaccactttaaagaggaaaaaggtgcttgggcagtttgtgactactgtggtggctgctgcattgctctctggtaaagccaagtaggtggtgggtgcggcctctgggctgggatgatccaccctcctggtggtggcaggggagccaagctggagccatggcctgtgcagtggtagcagctgaactgaccgctgctgcaggatttgcaagctgttacattttgcgaagccatgaagcacataaaacctcaagtagaacaagtgtttcaaagtctaccaaaatctgccttcagagattattactacagaggtggatatgaacccaaaatgacaaaacgggaagcagcattaatactagataatgaatgaacactagtaatagtagggtaagccctactgccaataaagaaaaaaataagagatgctcattaacatgttatgctcttaaatcacgcagacaaaagagggtctccttatatagtagccacaatcaatgaagctaaagatttactgcaagatcaagctaaaaacagtaggtgtataatgaatttttaacttcatattagtttatgtatatgaatatcaagtttttataataaaatgcctccaaacaaagaatatttgatttagggtttaataacttctaagaggggactcagatgtttcctgtttcacagtcagtctgagagggtcatttttcctggagctgacctgggtggaggcctcacactgatactccccagcatcctctctcctgatggggtttatgctgagcatacagtggccctgggacagctccattctctccatgagtcacagacgctggtcatggaagatccactggataaggttccagagtcatctgtggggcaggtcaggatcacaacatccttttcttctgtgactctggtgttgctgactcagatggggtcggagccactgaccctgtggacaatcagtggaggtgctcaactgaaagtgggctgagggcacgtcttctcctccatccctgggtccttaaggtaactgtggaccccagaccaactgacacaggagctagaaagaaattatttaggaagttagtgagggtaagagcgtccttggcaaggtttcccctttaacaaaaagcagcccaagataattccttttctaacaaagagcagcctgaaaaattgagctacagatgtagatgagcaagatggaagcttgcacaggtgaattccagtaggtgtgccaatagaaaagggctgcctggaagccaggtatgttcaacatggagactccatcctcccttttctccattaccacatgtacagtaaaaaaccaggcaacatggcaccggccaggtagacaatccatctgcatgacaaaagatcagagtggggcagccagcaaatggcacagctggtctaaacaatctttcaccccctgtataaatcagacactgcctcctgaagctcatctataaaaccttctgcatttcactatggaagtggcaacccattttccccaggacccctctctctgtgcagagagctcttctctttctttcccctatgaaacttccactcttaacttcactctgggtgcctgcatcctagttttccatggccatgggacaatgaacctcgagtattaccccagatgaatgatgctgtttcacaatcactggttcagctcccttcttcttagggtttcacagctcggtggggagaataccacgcctcagtggtctggggagtgaggaacaaatgaagaattaatcagattttacttagaacgctatcacctgcctcaaccatcagatccatgttgggaatgtccaggcctcctctcttagatctatacccacttcactggacctgaaatcctgtgtttcccgatgtgttggtgtcactcctatgagaggataaaggagagaactttgctttctctccccactcacaccctgcacaagacagggcccaatatgagacacacactcgctcagtagttctctcatgaaggagggagggagtgacctcgagtgattctgccatctgtagtctgtgtaccctggccagtggctgtatcttcatatgcctcagtttcccctcagtaaaataggacacacaatgagaactaaaaataaaattctaattccccagtgaactgaaaggatggcctcttggccaagcggatcccagagttcctgatcatgacaggatgggaggttacacctcattacagcccctccctttggaagtttagaggtgacaactgactagcattaacgctaaaatcgagatcatgagactgacagaacagactctctgtggccataagataccaaattataaactcaacctaaggtcatgcaggcaagggctaagccacactttcctacatttaaagaataagctatgttctaacacagaattttctttctctctagcggctaaagtaacactagccttcgagataagcaatattgaaatgatcgcggctcatccaccaacactggctaactgacccctgttccaacagccacaactacacttcaattggacaggagactgatttcagtaactttctcctaataagagaccactgagcatggcctggttctgctggtatacagacacggtgcactgagtaccataatgcttgtttcatcttttgatgtataagacctaatttaatacatttaaatctgaattctccaccccaaagtgaacatggggtgcatgtagcatgcatgtttgttgatcacgcatgtgcgtgtacttcctttgtgagtatccatagctccacctataacctgttgaatatgtatacctggccaactcattcagcataaatctatcttccacattcccctcccttgaagtgcctgctattggtctctgctggaggctgcatcttctaccctggggaatggccagcctgcaggctgtaaccctgtgtaagaaataacctggttgggtgcagtggctcacacctgtaatcccagtggtttgggaggttgaagtggtagaatagtttgagctcaggagccagagactagcctgggcagcatagcaagatcctgtctcttaaaaaaattttagggaggagagtgaggatcagaaaaaatacctattggctattatgcttagtacttggatcatgaaataatctgtataccaaacccctgattacatatataacaaacctgcatgcgtatctttgaacctaagataaaagtttgttttaaaaactatctgggtgcagtggtgcatgcctatagttccagctactcgagactgaggtgtgaggagtgcttgagctcgggggattgaggctgcagtgaattatggtcccacctgtgagtagccacttcactcaaacctgggagacagagcaagaaccggtctctaaaaaaaaataaaaatagaaaaataaaatgaaaaatatatgaaataaagtctcctttccaaacgtacagatctccgatttttctgccaacaatgataaatggtcagtggcttgccatgttgtctgtgaattacttttaaaatattcacgatcacctgacctaaaggttggtaccaaggaaccgcctgaatacaccgtctctgattatttgcctccaacagagtgttccctgggcctgatctctggtggacaatgagctgctgggaacatcctctcttctctattcctcccctggggatgctgaccttcccttggagtctcctaagttccccagggcagtcggctaatgtcctagggagcttacctgtcttctccataccaagtctcatgtgaaggacgaggctttgcccttgcccagatgaggctctgggggctgagccctggctggctaccagctgcaagagccatggcccttggacagctggtaaatccttgttcccagtcagccctgcccaagatgcctcaacccagccccggcacaggcttcccagggtcacatggagtcaggatcctgggacaggggactggacaggggtttccagggctgagtttctgaacaggggcttcccaggggtcccctcactccaggatctgacatggtcctacaaggaacgtccatggggaggggacccaggagggggaactgacactgacctccccttactgagcctccccccaaccccatcagactgtccttcctctgtagcaagtgcctgcagggtctggatgcaggaaagaaattctgatctgtggaagtttgtctcccctgtgtgtgtcttgcactaaatgtccaaacccccaaatgggatgtaatgtagagggggacacaggcacagcccaggcctgaaaatcctgtgtgtgtgaagcagaactgacccccaacacccagagctcatgagacatcactgtgtacgtgaaactggccagttacttcttcattcacaagatctgtttttatgacttgtagggtgtaggatcctgtgtcattgttggtgacattctgtatcagcagacatgtattggggtatattgtctctcagcctctgtggcaggtcctggggtaattacttgagttcctagtacatatcctgtaattcccctttgtaccagttgtagccaagcctaaggcagattgtgggtgagtggaagaatctccttgccttctgcagcttcaacagtgacttgggcagtggtaggcaagttccagaaagttaaaagtgaggctaggagtggggagagagcatcagttaatactgggccctatgcattgaggtggaaagatggggccctaggtcctggacaggtctcttcatccctcagccttggagtgtgtgtgtgtgtgtgtgtgtgtgtgtgtgtgtgtgtgtgcgcgcgcgcgcgtgcgtgcgtgtcctactgggccaaggtcagcagcatgacctcccttccttcagtgcctctgaccttggcatttccctgtttggagtccttttccccaggggtctgcctggctccctccctactgccttcaggtcctgctcacattagggcatccttgggagaccccttccctgacacctctagagaccctgggtcttccctttctgacctttcgctgctgtgttccctccagggctcttgtcaatacttgacctcacattctagatacccttgcatgtctgtcttcctccctatgagagcatgagctctgtgagaacagggacttgtgtgatcttggttgcaccccagtgcctgggacaggctgcggactcctgtggatgagctcatgagtgttcccagggcccttcacaacgtgggatttattttccaatggctgaggttgttggctaagagctctgttggagttcaatcaggctggtgggaaaaatattagagatagttatagagatagacacaaatcttcttggaagaccaaaaagtttgcataactttggtaatagatctgactgaaggtggtccctttacctttagttaaacaaattaaagtagtaacaaaggaaggcagagtagtttgtctagccagcttgtttactcatgtgatcttaagactaaccattgatgtgccacaggtgcttaattgctttctacttgggaagtccacaatgtcaattaccctctaacggtgttgactcaagcctttgttaattaatcttactgaataaatatgagtctcactagctgatcaaggccatggtcacaactgtttataggactcagcagggagtctgtaagcggccctgacagactcagctggactggcaaagcaaaatatgtgtgtgtcagtgtacactattcacccgtcccccacagctggtgcccctatatgaggagtgctgccacagagctctgtttagtgtcccttgttttttttcttgagtattaccccaacttaaattgtgattattgtcatctgttttcaacattaactgctcagtgatgattcacttggaaaacattaacaatcgagattgtttcttcactaacaacctcagattatttagattttcctgttgtaatcccttcttcctgtttagtgtccaacagaagccctctgtccctctcaggtccccgttctctccaagaaaccccagccagtctctgtgctccctcctcccatccactcccagggagccctcccctcacctgtgagcagaagcgcctgccagggatgtgcactctgtgaggaggggctgagggaggccccatgggctctgctgtctgctttgtcctcctctgtggagaggagcttgggcttcagaaaataaggaggccagaaagtaaggaacaggctgagaaataatggggatgtgtcgaaaggtcacagatgccaacatctttgtcctatgcaatattatccataaaattacaggtttgagatatgcttaaattttcttctaacatgcattaaaataaacatataacttttaatagttatattaaattgtatttaatataaattaaatgctcttgtcagagctactgtgactgtcagctctgctgtccttcctctctctgtgctaagcctcctcccagggcagaagcacttcccagggccaggggtgggggcggggaaaggtaagtggcaatgaggatctgcacaggtagcctttccgcctcctcccctctcagtcctgcctccttgtcttcttttcctctttttctccaatctacatttcagttccttagaccacgctgtgagaagcaaggcttattgggacccccatcccttaacaggatgacctgtgctccccataagtgacctctgctgtgtctagggattggctctgtcagcacctcacagagagtccctggggcccccaaactcagtgttattttctctatgacacagaaacccctctgggtatgcaaggttttcctcatgttttctaatgtctgggaaggttggatttactcccagcagggaggtcacagagatgtccagggagtggggtcctagaaatggacaaatctagagctaaagcccaggtctacgattttcagttgtttttttctgcagtgctatgtgaccctaatttcctaggagtaactaaaatgcaaacctcagacatttgtagacattttatgatttttctctacagcttgtaccactgttattattatttgctttatgctttttcctaaataaatttactttacaaaacatccttgtcctagtagggtgcaggggctcacgtctgtgatctcagctgcttgagaggttgaggtgggtggattgcttgaggacgggaatttgagacaaaacatctttgtcctatgcaatattatccataaaattacaggtttgagatatgcttaaattttcttctaacatgtattaaaataaacatataacttttaatcatcatattaaattgtatttaatataaatttatatacaatacatttttatataataaattatatatataaatgtatatataatagtttttcttttttgagatggagtctggctctgtctcccaggctggagtgcagtggcacgatctcagctcactgcagcctccgccttctgggttcaaacgattctcctacctcagcctcccgagtagctgggattacaggcgcctgccgccacgcccagctaatttttgtacttttttagtagagatggggtttcgccatgttggccaggctggtctcaaacacctgacttcaggtgatatgccgcctcggcctcccaaagtgctgggattacaggcatgagccaccatgcctggcctatatattttatataattatataaagttttctataataaattttatataataatatataaaatggatatttatttaagataaagttattagttttatatatttacatatatttaggaataaatgtgttactgtgggagcccagtgcccaggcaggtagtcagtacatgatggttgtcattagggttaatactttggaattctggattttttcccaagagagtgtctacgctggaatattgggcttgtggctttctgctgatgtgcatgtgtgaagaagctacttccacttattaggacttgtgtatctgtctcgcagtttcactacctattttctcgtgatgttggtcaagtcgcctaacttttctgtgcctcatttacctaatttgtagaatatgggtaacagtacacaagtgtgagtgtgtatttcccaggactgaccactagagggcgtgaaggcaccggcacttactattacagcaatgggtgtagtagtgctcatggtcgtaaacatcattctcccatgaaaggaaccagggcttcctgggagaaataactgattccagggctggggccggaaagcacaagcggagcctggagcatctcgtgaggccagaaagtaaggagccggctgaaaaataatggagatctgtcgaaaggtcacagatgccaaccagaaggagctttgaatgaccaattttgagacaaaatgagcactataagaaataatgatagtaataaattccaacccataaatacccatgagttcctactaatataaataaataattgaatacataaatatataaggatgaagaaacagctttttcttacagcagaattccaattaatgaatgtagaaggaatgatcaaatagaaaatcactatttggctaacagcacagtcaattgtttgtaggcaagaattatcaatggactttaaatatgaatgggtaaaagtatgatgatgctacaactagtgagtaccaagggggaaaaaaaagtacgttgagaagaaacaggctacttccatattcccaaagtatcacttcaggagctacttattgattataatgggacaaatagtaacttacagtagagaaacctggcaacagagtctctccgaggtacaaaggctctcttcaggaaggaggtaaggggaaggaagaagaaaacactgtcctgcctcaattatttgctttccccattctcaagtgtacttcatagacattcaaagatatgtgttgatagtgtccacgatccacatggctctattatagtcatttattcacacatacattcagtgaggctttgagtgcctaatgtgtgcctgatatttgctagatggtggatgctgagaagatcaggtgtgctgctgtctctagggtgactgaatccacctgccccactttacagatgtggaaattaaagtgaaaaggatttataggattagttcactgtcacaaggtcactagccttaaagttacaggagtaaagcaagtttcctgacttgctagattttctgctgcaggtgctgacaatggtgagctccaataggagagaggacactcagagtgaagtgggagccctgaacaccctggattagccaagaggacatgccgggtccagctgtgaccgcacaaaggaccattggggatatttgtattctctttttcacttagagcttgaaatgaggaaaactaagtgcagaaaaccaagagtggaagatttttcacaaagcactggtaacatgcatcagaaaaccctgtgctgatgtctgtcacggtgtttctcactgaacggtaatagtctggctttgagtgtgttccctctacagcctggagttctgcgaggcagggaccaggtgtgattcatctttgtctctccagtgacagtacacagcaggctctgataaatatttcttacaaaataaaatggaataaaaagtagacatctgcacaggtgtgggatgactgagcagcagcagaagcaggaaaagtcagcgtccccagatcagctgatgtggtgttcggattctagataggggtgaggtgccaggatggggatgggggtcctgtggctctgctgccctgggggacacccctaggtttcacagtgcctgctgtggttgctgcactttgcttccccatgggaaagtgatcagagggtgtggggcttcaggtgaccccatgtgggaaatggccaagggaaggtggggtgggcggcacatggttttttttaaccaatatttgaaggtaggttgtatgaaaaggtgttaggcttatttcagcttatggggagtaggacagggattggtgagtgtgtatcaggtatattttggctcaggatggaaaagaactgtcacagtaacataaggtcttttgggaaattacatgtttactggcagagttcaggccagggctgggtgtctgaaaatacctgtcagggtcacttttatggttacaagggcagagcttggcttggaaccaggtttcttactaataccacatattaagtattataaaaactgtcctttgcaataggacattgctctatgatgcaggttgaggtccctctgtttaagtaattgtgggtggctgtgattctctcatctagtctgcgacttggacttcacctccatctgcagtccctctcctttgctgttgacactggtcagagttaagcgcatttactgacgatggtcacagggtggcagcactgcctctctggtattttctaaaacctcttcctggaactgagccagtctaagaggatgtcatgactaagaaaagggcactaatgaggtgaacagataattttttttttcttgtttctcctgtgaagtaacagagtggaggtgagcatggaataattgccttttagaaatggaagacaatggagagaagtgtttcgcaaaccttaatgtgttcacagatcccacacagatctttttattcaatacagattctgatttttctggtgaggcctgagattgtgcatgtctaaggagcttttggatgatgccattgctgctggttggcggaccacactttgagtagcaaggctcgaagatcatttagaggttaattctcactgcatctaatttatggatgaaaacaaaccaaggtccagagagagcatatacagcttgcctaacaaagccattccctaagtgcctgacttcttgcatttaaacccagggcttcagcctttgtccagttctcactccacacatcacacggtttgttcactgttgtgaacgacagttgtggcagcatctctttagtttaggaatccagagccccaatttcactaccctctttggtcttggctcatgctgtgacttcgaatagttttgcccttacttaaaatcttcagtggctcttttgtaatcacaagatcaagttcgaatatctctgtctagtgttcatggctttataacatatggtatctctttagtaaccttacctaacttccctgttttaaaattgtctcttgctgccatagccctccttgctccttcctgctccctaacaaactgtgttcacttctctctcagtggtagtgatgatggcatggcctctgatgttagactcatgtaacttctaatcccagatccaccaccaacattggcaagttgattcatctttctgaggataagcatcctcctctgaaataaacttagatggcggttgagaggggtaaataaaataacacacaaacccactctcatccctgagaccctcttcaaaactagcatataaaaatagctatttgaagaggttcagtgaaattcaaggtaacacagagaaggaattcagaatcctatcagataaatttaatagactgaaataatttttaaaaatcaggcagaaattctgtagctgaaaaattcaattgacaaaccgaagaatgcactaaatctttcaacagcagaattgatcaagcagaagaaagaatttgtgagcttgaagagataatatatgaaaactcagagtcagagagacaaaagaaaaaagaattaaaagaataatgcatgcctacaaggtttgattattaagctactcaaagagatacaagagaagggtgaaaaccaacataaagaaatgtaaaaaacaatcagaatataaatgaaaaattttctaaaatgctagctagtttttttttgagacaggctcttactctcatcacccatgctggagtgaagtggcacagtcatggctcactgcaggctcaacttcctgggctcagatgattctcccacattagccttccaagtagctaggactaaaggcgtgtgccaccaggccaggctaattttttgtatttttagtagagatggggttttgccatcttacccagggctggtcttgaactcctgggctcaagtgatccaggagattcactgccaaaaaggatataaccaagtcatatagtcataggttatctaaagtcaatgtgaaggcaagaattctaagagcagtgagacaaaagcatcaattaacttataaaggaaaacctatcagtctaacaccagatttctcatcagaaaccttacaaaccagaaggtattggggtcctaatcttttggcttcttaaacagaatagctctcagccaagaatcttgtgtagagtgaaattatatttcaaaatgaaagagagaaatacagtctttttcaggcaagcaaatgcttcaggatttgtcacggctagaccatcctacatggaatgttaaagggacttctaaatcacaaaacaaaagatttaaatagaacagaatagaacctcttgaaaccaaaaaattcaaatggcctataaaacaataacacaataagaaaacaaagtagataacgatcaacatgatgactggaacaaatattaacattgaatgtaaatgacctaacactccacttaaaagacacagattggcaagataaataaaaaatcacaaaccaaatatcagctgtcttcaagagactcacttaacatgtaaggattcttatagactcaaggtaaagagatgataaaagatattccatgcaaatggaaaccataagtgagaaggaatagctatccttatatcatataaaacagactttaagcaacaacagtaagaaaaagacaaataaggcaactatataatgataaaaggatcaatcaaacaagaagatattacaatcctaaatatatatgcacctaactttggagctcccacattcataaaacggttatgatgagacctaagaaaaaagatcaacacaaaacagtgagggtgtcctgggttttctttttattggacagcagtgtactagcctatcactttcccagtcaggggatttttggtctccccattcccctaccatgggttcatgccaaagtccatattttttattagtgtttggaattggattttttttttttgaggtggagtctcgctctgttgcctaggctggagtgtagtggcacgatctcggctcactaacctctgcctcctgggttcaagcaattcttctgcctcagcctcctgagtacctgggactacaggtgcatgccaccacacccagctaatttttgtatttttagtagaaacgagatttcaccatattgtccaggcttgtatagaactcctgacctcatgtgacagggaaacaggcactcagtgaacttcatgcgattgaggagttaatgataatgagagaagggctgtgaggggacagcactggggacaccagagcctgtgacgggctgagttgctgtgccttgggagatgcccttttgactgagccctgggaaggagggggtgtgggggcaggagctgcctgcagagggagtggcctcaggtgggcggccacctggctgcagggaagaggtgacagagttcgtgtgcagagcttggagggtgaggaggaggtgggttgaggtgaccttggtgagggtgaaccatggggggctgtgggccctgctgagggaggccagccagccctggacctacagggtggtttggtcttttttgtcccattcccagcatccactgagtggtgaaactctgcaggccagggaccatcccactggccagaaggagcgcacagtaggtgcccactcagtgcatgttgggctggacagaacctcactctgccccctgcccccagctttgggagctgcagcaaggtccctccccctagggatctccatgcctctgtctctgaggggtgagatggggagacttcaaagggccatctcagagtgtgggggatagagacgcagaagtgtgggggatagagggaggcctgggctctagacccaaaggaccttacacacctcctgagtcttttcaaatggtttcttctgttactttaaaaatgatgtaagtcatcatatttattgtaaatcccaggaatctaatcatgcgtaaaataaggtgtcttatccttgaccccaccccttccccaattaaatttccaggatgttaccactgtttgcagttggtgtgaatctctctttaataatactctgtttatctcacttgtcgttttacgccaaaatacccattgaattatattattgctgaagaccattcttttttttttttttttttttgagatggattcttgctctgttgcccaggctggagtgcaatggtgtgatctcggctcactgcaacctctgcctcctgggttcaagtgattctcctgcctcagcctcctgagtttctgggattacaggtgcacaccaccacacctggctaatttttgtatttttagtaaagacagggtttcaccatgttggtcaggctggtctcgaactcctgacctcatgatccaccctccttggcctcccaaaatgctgggattacaggcatgagccaccacacctgcccagaccattctgttctactgaatcatgtgtggtgggcacctcttatatcaatacatatggattttatcttgtgtttgttattggctcccctttttctcattgcatggctacactcaatgctttgtccacacccctgttcctgggttggaatcttgtgacagaaaatgaagtaacaaaggctaaagctttctaaagtggagtcaggagattgcaagacaattgcactttcaccagcaagagctcaaaccacagaatgttccaatagatttggataaacagctgaagtcagtattcaccagccttcaacatctcaactaggagaaccctaaaattaactaagcacatagaatggaatggacttgtgatttaggattccttctcagccaatgagctgcttctgaaaacaactttttgtggaaattacctgtaaagaaaaccctctcctgtgcttgtcttacagaacactagtcagggctgccctgattcagtggacccgaattgctattatttgtttcctaaacatatggtattttctgtgaccttcatctcaatcttttttttaagttactgggctgtttcccagttttcataatgacgagacattctgcagtgtttcatacacatgtcttttccccatgtggagtattgatccaggagctcattcagtcaacgcatgtttatgaagcatcctgtgccaggctgtgggctggtcactgtcttcagcagagagaggacaggcacagtcttgccttcacagagctcacagctcagggaggctcttagaagtgggatactggtcggagcatgtgcacattaaacatgatgaggtcaaggttgctatagggactaaaccacagtcccaccaagatcgcattgagttcctgtggtagaccagaggtcagggcccctaagatgtcctgagcagctccctctgctcagaagttttggttccacaggtgacacacctgagcacaggtgacccctgcagaacctgtgattaccacccaaagccaagagtgagtggtgggtgttctaggaggaaccgtcacctccatgggcagggttggggaagactgaggggagcaggtggctgatgactttggccagaaggtagggggatgggcaggtgtgcgctcatagggaagggaagagaagggagggcattgcaggcaacaacacaaaggttggaacctgccttcatggactgagaaaagcagggagtccacccaggctgcagctggggagggaagacatggggagcagtgggtctaggggagaagcagactgcgattgaccttggggactgggcagtgagcagaggtgtgttatgtgtgtctgtccccatcatagatatgaggaggggtgaggccgcgggtggcacctgggtcggtgggatttcatagtgcctgctgttccctagagcctctctgtatagagggtcagaatagatctgaggctgtggtctgggggaaggggctggtggtgcttaccatctctaggggtgggaggagagggatgaggatgcccctgagcagtgaagcctcaaggtgtgtggagccacagttgtctctcattagacatgtgttttgcgtgaggatgccagggcctggtggttattactgttgtcaagtttgcatgacaaggacccaggtatccagggatccagagcacagggcccctggtgaggggatgaggctcagatggggctgaccaggttcatgtggtcagagtgggagggactgatggagagacagagcctcaacccctcctgtcaggagctgtggctatgtccaggagagatgacaaggatgacccaggacattgagtgagtcattgagacattgaaggtgaggacagggcagagaggaccctggtgactgctgaaatgtaggatgtgaggagggctctgacccatgcaagttacaggacctccccacccccgagcccacagatgacccttaaattgggcatcctgagtgctgtgtgtgcccagcagggacactggataggctggacctgagtctctgtaagggcagcgctggtctgtaggaccagagtcttctctgtgggtgtgacgtgggcaggaattagcaagatgggggtgacaaggcttggcttggaggatctggtacagaagcccatgggcttggtcagctcagcttctcaggggctcagctggggctggaggagcaggatgctgtgctcagggcatgctccaggcagcgtgatgtgtgtggttccagggtcaggcacgggggtcaaaaattaaccatgaaaagttcccaccttctgtaggcagagaaaatggcctgattgtcagggtcagggagacttaccatgtggccaaagcaggctctcagcctcccagagaccacaccctgggtgcagcactcagctctgcagggtatggcaatagatgtgccaagaaccccaacatccagatgcatgcaaaaattttgcgatatataaaatagagcagatcaagtttccctgcaataacgttgttcctggttgtgtctttttcttgtaaactagacatggacatctttccagcagtctgttctcatctgccaccttcctgctgcagcacctcagaatgaacattcctgagacactgtccgtggtgctgacgaccaagagctatggaacagagtgtgatgtagaatcttctagttacctctgctctcctttcacttttaacaacagagcatcattaacaatgagaaggtggagaggtgttcaggatcttgaagtgacttctgtcttgctctcccataaccctgaagctgctgtagacattattgcagaaactgacaccacagtcaggatggccttgtccaggagcccatgtgcagtttgtagtgagcaaggatgagaaaatggtcttgaaaggggtgatggacagaacaggggcttttcaaaaatgtcacatcatcacccccagcatccgtgaatctgtcacatggtaagagaccttacagattaaatgaaggattatgagtttggaagattattgtagtttatccagatgggtccaacataatcacagaatcccttccttacaaatgagagagggaggtgggagagtcagagaaggaggaggagatgtggggatagatgcagaagacagagcggtgtcaagatgctgcactgctggctttgaagatggagaaagaggacacagccaaggatgcaggaggcctctaggaggtggaaaaggagaggaaacgcactctgccctggagcctccagaaagaacgcagccatgtgggcaccttggttcaagtttctgtgtcacttagcttgtgggaatttgtcacagcctcaacaggaacctacagaggagtcaccttgtgtgcaggtgggatccagggtcatttacagctaaatcctgatgtaaatattgcaggttgcttttcctacttcctatctcatggccaacaaccctggacaatggcagaacacccttggaaaccacggctctgtgctttagtggagggaccagcttgtttgtgggaaggtagcacctggtccaagtgaacctacatgagatcgttactctccccagggccctcagggaagggctgagaacagctggcccaggtgtgtggaggagctgcaggtgaggcagggctggaggggcctgtgggtccaggtagaggggcagacaggttgtcccatcgccatgggagcctgcacgagctttaggttggggaaccctgctcctctgacctggacgctcctgtgtggagaggaggcttgctcagtgagatccacgccagggggtaaattgggaactgatgggaaatgaggggctagagtcctgggtagtgcctgggaggaccttgctcaaggactgaattcttggtctgttcccaccttggttactctgacaacccctctctgtgtcccacggggataaagatctcctgagcagtggccattgggacagaggagaacctggtggccagagctaagcatccaggatcctggatttggggacaggcaagctcattgctgggggacagtgatagatacggcctccagggcctgggtgaagagagcaggagggctcaggacactggaggctgtgtggaggtcacacccacgatctgtaccacccatggatgctcctgcattgctcacctttgtgtggacatcagatggccccaacttttgcactcctgagacatctcatgcattcacagagggacccaggctggggctgtgcatggccttggtctctagggtagtgtgaggacagctgagcactcagctggctgggcaggactcctgcgaatcctgccctttcctgtgtagggtccaccccagcctgactcctaaccccctactcctgtctttccagggaagagagactggggttgagataaggtggagatatttttcctgtgtgacccaggagagaatggacatggagtttcaggtgagtttctgctaagttcccatgagcagaaaaagagccaatgagaggaagtttcccctttattcagatcctttccaggtgaccccgggtgggccataggcccattcactttccctgcaagcccccgcttcctgtggtgatgggaagccttcgccttggcccacccagagcccggggcagtctgttgaggtctctatatattcagcagggacccccatcccttcctgtccccaggcctgtgtctcctcaggactcagagctggttctctggctcaggctccatgtccttccccatccccagggctgggggcttcagggacgctccatcaacccacaggagcagctcccagaggaacctaagaagccacatctgctttgtggtcgatccagcagtaaatgtttgtgtcagagtgtagcaattccagtaaaaacagagaagaggtcttgacccctgaggccttctcagaacagggtctggcatctctctctgggcccacccagggctactctgggactgaacctggctgtgctcagggggttcctgctcccaggcccctccctcctctgctcaccacctcctgttattttcactgcagtttcctgaacttcagctcagccagatgccagtggggacagatcctgggtctccctggggcccaagggaccagaatatctgtggcccccactcacctcatagatgagagcagctgccctggtgctgggtaggggaatctgggcaggggagagaggggtgtcaggggacagggaaggattcctgctgtgtaggaattccagggctctcctcaggtgatggagggtcccagggtggggttagcacagggagtggatgatcctggccctgaacagaggcccagctcatggccagggcaggtctaaccttatccaagtcattctgggtagggtgggtttgtgctggggattgacagtccccctgccctgagcctgcacagctggggccccagtggaaatgggattgggaacggacagtcttacctaggagatggagctgtcagagggtccatggcctggggacagagacaaaagtgagcacgagagtgttaggatagctgggcccctcctgcaagagtgtgtgggggtcctcagttcttagagaattggggagagggagcctttctcaggttattttaggggtcaagtaagcaagtgaggttgaggaagtgacccatgacccagagcccggaggttagggctgacccggccagttggggtttcctgtgtgatgttttatgggatcctctttgcagccccagggatagggtcagaggcccctgggtgtaactggcaggagtggacaacttggggctggcttagtagttcccagccacacccagactgaagggacactcaccgggggtggaggctgggggctgctgctccctgaagtcactctgatcgctggccctaggaaaggtcagggttatttgtgaaggtgcaaggttaaaagtcacaaattggagttaaaataggggaccaggaaaggagcctatttccaagaggggtatggagacctcctttctttatggagttctgtggtaggaggggcccaggtgaggggagttgaggaaaggccttacaaagccacatctgtcctggccagaggggaaggactctcaggcagatgctgggccaggagaacattgatccagtgacacaggaaagggactgaggacccagggaaggaatcagaccaccaggggttgcctgagaggaagggtcaaggcaccagggggaaagcagggccaggcacatgtgcaggacactgaggggactgcatgcatcttggattctcctggaactcagtgtccctgctgtgaccagacactccactcagggctggagatgctgaaatgggacaatgatcttgtcttctgtctctgccctttggcaagagacataaacgacattccaggatatgccatattggggccccggttctcccttctcacagctcagtgtctgcagttaccatgtcagtcaaaggggtgctgaccccacccagcccgtccaggctgttccagtctccactatgtgataatgcccaggatcccccctcagatgccctctcactgggtggatggattcagtgaacagggggaggtaccaggtattgagcaccgctcccccctgctccaggcagctgtggctttgctgtgctaggaaactaggaccatgctcaggggcatggccttaattggactgaattcactgaggacaaagctgttgaggaagcagcccagggtcagcagctggtgaggaaggtgccatggaatgagagggaaggatccctggggagtcgggaggctggggagagcctggcactgaatacaagacagggtctccttccttctcgcctggggtcagcgtgaaggatgggagcagaatggggaaaagctgtggtacctgccagtttttcggaggagcaggaaacacacaagtgcagccaccagaagactcccaaccaggaccccgatcaggatgcctagagtgttgtcatctgctgaaagaagaaggcaaaggggatgaggtccaaatctgttccagggggaaccatgaggggccttgcagggcaggggcatggtcagggaggaaggaaatgccatggagcctgagtgtggtctgttgtgctgtcctcatagctggctcccttgctctccgtggttgcaccattttctgtgtcttaggcttgaattactgggatgcatcaactcctacattctcccacaggaagcctgcacctcatcctgctcctgtgttttttagtccctccttcctctcacatcactcctcttccccctgtttctttttttccatcccatggcagtcgtaaagggcaggcccttgctgccaactcaatgctgatgagcagggatgatgttcattgactgttttcaggggccttccacatggaaggcacagtgggaatcaatctacctgcagcttttctcaccctcccattgccttgagggagaagggtatgtgatattgtgaaatacgtatttggtgttcatcaccattgatatggttaggctctgtatccccacccaaatctcaccttgaattgtaataatccccatgtgttatgggagggaccttgtgggaggtaattgaatcatgagggtgggttttttccatcctgttcttgtgatagtgaataagtctcaggagatcagatggtttcataaagggaagcttccctacacatgtcctcttgcctgctgccatgtaagacatgcctttcaccttccatcatgattgtgagacctctccagccatgtggaattgtgaatcaattaaacctctttcttcatacattaccaagtctcaggtatgtcttcattagcagtgtgagaatggactaatacagtaaattggtaccagctagtggagtgctgctataaagatacctgaaaatgtggaagtgactttggaactgggtaacaggcagaggttggaacagtttggagggctcagaagaagacacaggaaaaaagtttgaaacttcctagagacttgttgaatggttttgattaaaacgctgatagtgatatggacaataaagtccaagctgaggtggtctcagacagagatgaggaacttcttgggaactggaacaaaggtgactcttgttatactctagaaaagagattggtggtattttgcccctgccctagagatctgcagaactttgaacttgagggaaatgatttagggcaactggtggaaaaaaaattctaagcagcaaagtgttcaagatgtgacttgggtactgttaaaaacactcagttttatgtatttacaaaggtatggtttggaattggaacttatgtttaaaagggaagcagagcataaaagtttggaaaatttgcagcctgatgatgcaatagaaaagaaaaatccattttctgaggagaaattcaagccagctgcagaaatgtgcataaacaatgaagagcaaaatgttaatccccaagacaatggcaaaaatgtctccagggcatgtcagagaccttcctggaagccccttccatcacaggactggaggcctaggaggaaaaaatgtttcctgggccaggcccagggctcccctgctgtgtgcggcctagagacttggtgccctgcatcccagccactccagccatggctaaagagggccaaggtacagctggggccatggcttcagagggtgcaagccccaaaccttggcagcttccatgtggtgttgagcctgcaggtgcacagaagtcaaggattgaggtttgggaaccttcgcctagatttcagaggatgtatgaaaatgcttggatgtccaggtgaaagtttgctgcagaagcagagccctcatggagaacctctgctagggaagtgttgaagggaaatgtggggttggaaccccgacacagagtccctactggggcactgcctaatggagctgtgagaagaagaccacaatcctccagaccccagaatggtagatccactaacagcttgcaccatgcacctagaaaagctgcagacactcaacgccagcctatgaaagcagccaggagtggggctgtaccctgcaaagccacaggggtggagcccaaggctatgggagttcagctcttgcatcagtgtgacctggatgtgagacatggatacaaaggagatcatttcagagcattaagatttggctgccctgctggattttgggcttgcatggggcctgtagcccctttgttttggccagtttctcccatttggaatgggtgtatttacccagtgcctgtacacccattatatctaggaagtaactaagcttgcttttgattttacaggcttataggtggaagggacttgccttgtctcagatgaaactttggacttggacttttgggttaatgctggaatgagttaagactttggggaactgttggaaggcatgattagttttgaaatgtgaggacatgagatttgggaggggtcgggtggaatgacatggtttggctcttcttcacccaaatatcaccttgaattttaataatccccacgtgttgggggaaggacccagtgggaggtaactgaatcatgggggtggattcttcccatgctgttctcatgatagtgaataagtctcacaagatctgatggttttagaaaggggagttcctctacacatgccctcttgcctgccgccatgtaagacatgccttttgccttctgccatgatttcaaggcctccccagctatgtggaactgtaagtcaattaaacctcatttttaaaaaaattacccagtctcaggtatgtctttatcagcagccaagaccagctcggtcgcggagatcctaacccagcagtgctagaggaattaaagacacacatagaaatatagaggtgtgaagtgggaaatcagggttctcacaggcttcagagctgagagccccaaacagagatttacccacatatttaataacagcaaaccagtcattagcattgtttctatagatattaaattaactaaaagtatcccttatgggaaaccaagggatgggccgaattaaaggaataggttgggctagttaactgcaacaggaacacgcccttaagatgcagattgctcatgctattgtttgtggcttaagaacgcctttaagcggttttccaccctgggtgggacaggtattccttgccctcattcctgtaaacccataaccttccagcttgggcattagggccattatgaacatgttacagtgctgcagagattttgtttatgaccagttttggggccagtttatggccagattttggggggcttgctcccaacagactaatacacccattttctggtatgtgactctaaagtccttagaatcttcaaagtgatgtctttttcaagctaataattgactgatgactggcagcccctaggcaacttcagaatgaggctggtcactgacccaggtaggattagagggttgggactttcagcctcacccctaatccctggggagggacctggagtttgaattaatcaccaatgaccaatgaatcaattaatggccaatgattgaatcaattaatggccaatgattaaatcaatcatatctatgtcatgaaccccaaaaggactgggtttgaagagctgaacccatggaagtttctggagtgtggtgcatctggggagggcatggaagctccacaccccttcccacatgccatgctctgtgcatctcttcatctgcatcctttgtaaagtcctttattacaaaccggtaagcctaagtatgtgtttccctgagtcctgagagctgtttgagcaaactaatccaacccaaacagggagtcatggaaacctcaatgtgaagccagtcataagaagctctggaggcccagacttgtgactggtgggaaggtggtggcaattttgtgggactgagccctctgctgatatgtccaggtagatagtgtcaggatggaattggaggacacctagctgatgtacggtgcagaactgattggctgctgggtgtgtgggagaaacccccccgcatcacatttggtcacagaagtgtgtctgtgttgatgattgttattgtggagtgagagcagaggaaaaacacagtttgagtttttccaaacagggtggaatcccatctgccaatttagaatctgaaacttatagtttcagtacttcaattaagattgaagtacttcaattcagtacttcaattaagattcagtacttcaattaagattcagtacttcaattaagattacagaactggtaagtgaaagtgatacaacaaaaatgtaaccaaagtctgctcaacttaacagctaataacaacaaagttcataaaaataataccagtcgatattgatagcactgattgagccctggctctgtgcatgaccttgttaagggctttaatcgcattaatctctgaataaatatcctcacaaccaccctgagatccaggtgtttgtaacaattctacagatgaggaaactgaggcccaggaggttgagtgtcttgcccaaggtcaaatacctggtacctattgtaaccaggatgataactggatgagtctaatccctgagttcttacccacattgctccccaggctctgaaggaatctcatccttctcattccgtgtatcattttacaccccccctccctcctaggaaaatatacaaggaaaggagtgagaggggccgagggtcactcacattttacagtcagcttgagggggtcgctcctgttggagctgactgggttggagacctcacactgatactccccagcgtcctcctgcctgatggggtctatggtgagcatatggttaaaccaggacagcttcatcctcttcgtgacctgcagacgctggttgttgaaaatccactggaaagaggttccagtgttatttgtgtggcaggtcaggaccacggagcccttctctgtgactgtggtgctgctggcttggatggagggctgagccactgactctgtggatagagtgaccaacagaaagtgtcttggggccatgctgcatcctcagagatctcagagtcaaatttagaacattctcctgtgaataaaggagaaagatgaaggacagggaggagcagagagaaccagagacacccatagcagcgagcagtagggactacagtgacctcagagaccccagggaccaggaggacccagctgcctcagaccaggaccagggagccctgaaaaccctcccacagatgagcggccccagagtcacatgagatgcaatacctggggtggctttaggagcaggcagtcagagaaatggaacatgggtctcagcccctaagggacaaggaagaggtgtggccagctcctcctaggatcctacatccaggacccagtctgtaaagaggttatgattattcctttcttttttcattaattccctccctccttcatcagagaactactgagtgtgtgtctcagttgggccttgtgcaggtacagggtgtagtgggaagagaaagctgagtcctttccttcatcctcccatgggagtgacatcaacaaatcaagaaattcatgatttcacgtccagtgagggaagaaatgtggatctgatgggagaggcttggacaatcctggcattgagtctgatagttgagacaggtgatttcgttctaagtaaaaactgactaattctccatttgcccgtcattcctcagaccagaatctccctctctgagctgaggatgcccaagaagaaaggagctgaaccaacatctggtcctggggtccacagatgccccacggtggtggccacgaccagattctgggctgcagacacacggtggtgtgacgttgagcactgacagcctgtgtgatgctgatgcaatttctctttaataaaatggggtaaatgtcaatggtccctggcttgccatcctctctgtaaattaacattaaaatatttacaattacctgacctaaagcttggcacagaatagctccaaataaacatcatctattattattttactccaaaaaaaaaaaaaaaagagttctctgggcctgattcctggtggagaaggagcggtccagagtgtcttttctctgctttccctcctcctgaggacagtgcacttcccgggacatcttttaagtttcccatccagtttaatggcctgggaagtttgtttgtctgtcctctccactctgactctcaggtgaaagatgaggctctgcccttgcccagatggggctctgggggctgagccctgcctggtgaccagctctaggaaccacggccctgggacagctggtaaatcgttgctcacaatcagccctgcccaggaagccacaacccagccctggcacaggctccccagggtcatctggagtcaggatcttgggacaggggcctggggcaggggcttgaagggctgagcttctctcagaggatcctcaggccaggccctgactgagtcctataagatctttctcaggtcatgtctatgaggaggaggccaagcggggttggactgagactgattttcccccgctgcatctcccgcatcagactatccttcttgctgtagggaatttccacggagtccggataagggaaaggaattctgatctgttatagtttgtctcccctgggtgtgtcctgcactaaatgcccaaaccccaacatgggacgtaatgcagagggggatgcaggcacagcccaggcctgacaatcctgcgtatgtgaagcagaactgacccccaacacccagaggcacggaggaatcactcaccgtatacacggagatggtgagatgcctgttcaatctgagaatttctgtatgtgacttgtagggtgtagtatcccgtgtcctctagggtgacgttctggaaatgcagatctccactgggtgatattgtctctcgaccgctgtatgcaggccctggagtcctaacgtgagtgtctattacatatgctgcgattagctggttgggctccaccgttttccctttgtaccagccatagctgtaaagattctcgggcagataaaccacagagagatgaacattctccccttcagcaacttcaaagggcgctgatgcaataaagagccaggcagtggtgggtgcgttccagaaagttaaaagtgaggctaggaaagggagagaatatcagtcaatatttgacctatgcattggcatggaaagacggggtcctgggtgcaggtctcttcacccctcagccttagagggtgtgtgtgtgtgtgtgtgtcctactgggtcaaagtcagcagcatgaccctcattccttcagtacctctgaccttggcatttccttgtgtgaaccctctttcccaggggtctgcatggttccctccccactgccttcagttcctactcacacaagggaatccctgggagacttctttcgtgaagcctcctctagagaccctgggtcttccctttctgacctttcccagctctgttccctccagggctcttgtcagcacctgacctcacattctagatctctttgggtgtctgtcttcccccccatgagattgtgagctctgtgagggcatggacttgagtgatgttagttgcaccccagtgcctgggacaggctgcagactcctgtggatgagttcatgagcgttcccagggccttccatatcctggggtttatttgctaatgtctgaggttggcagatgaagacagagtttcatgccctggtggtgtttttatttaaattgtcactgtgatatagttttactatcattttcaaaatgtagtggccactgacaatgaacttgaaaacatggaccaactgagattgttttgccccttggcaattccagttcacttagattttttggttctccttagacgctctctcccctgagtctctaacaaaagccctctgtctcctctcagagccccatcctccccaggagaccccagccagtctctgtgctccctcctcccacccactcccagggagtcctcccctcacctgtgagcaagagcccctgccaggggatgcattctctgtggggacaagctgaggggggccccatggtctctgctgcctgctctgtcctcctctgtggagaggagcttgggctccaggaacgctctagacagggttactgtgactgttgtctctgctgtccttccttcctctatgctgagcttcctctcaggcaggagcacttcccgtttatgggcaagggcggggctctgcctacaatgtctctctgtcccctcccctctcagtcctgcctcccttgtccctcctttctccttcctttttgcctatatttggttccctaggcaaaactttgagaagcaacgctgatggggtcctcataacaggacgacccactctccccagtactgacctctgctgtgttctggccttggttctgtcacagccggtagattatttccctttgtgacacacaaaaccagctgggccctgggtctcctcatgctctccagtgctccaggaaggcagaatgatgcccagcaggaaagtgacagaggtggctctgggggctagaaaggggctcactgggtgatggctgggaaggacccacccgctatcttcagtgtcaccagcctggcctctgacccagggacagagacccaggcctggaggtctcgggaggatccccagctcctaggtgtggagggaggtgtcctgtgtgtcctgggaagagaggactttgatggaaggaggtgggaggctctgggttctgctgtccttggtgaaggtttcagggggaccctctccatgtctggggtctgtgcccccagcttaactctcattctctttgcaaatacatatattttgtggatctgcagttgcctgaactgtctcatgtccctaaatctttgtatccctttttacagaaggtcaggaagggtgtgtacatgagtatgaggactatctgatcagggcgagtgtttgtttcccaaagatctctttagatatggtataatacataagataaatgtactgaattagcaattttaagtgtagaattaaatgatactaattctattcacaatgttgtacaaccatcaccataattttttaccagaaaatcttcattataccaaatggaaacttcatacttttaatcaataactccccacttccccctgccccacccactggtagcctctgatactatcaatctctgtgaatttgcctagtttacatgtctcatataataaggaattatatacgtgtattatttttttctggattatttctcttagggtaacacttttaagattcatccacgtcgtagcatatattacagcttctttcctatttatggctgagtaatatcccaatatatgtttatacctcaattttaattcattcatctcttaatggacatgtgggtggtttccacatttttgctattgtgaaaaccgctgcaatgaacttacacttggaagtatctgtttgggtttctgtgttcatttctttgggggtacatataggagtataaatatggggtcatgtggtagttctatgtttaagtttttgagaaacagccaaactgttttccagtttgctgtgctattttatattcccatcagcaatatacgagggttccattttctctacattcttgtaaacacttactatttaatattttttaaaacttatagccattctagtaggtgtgaagtgatagctcattgcagttttgattttcatttccctggtggctgatgaagttgagcattttttcatgtatttactgacaattttaatattttttagagaactatttattcaaatcatttgctgtttaaaaaaaatgggttatctttttattattcagttgtaatagttctttatatattttagatacaagtcccttatggggtacatgatttgcaaaatttttctcatattctgtgtcttctcactttcttcatggtgttctttgaagcacaaacatttttaactttgatgaagttcacttatctatttttaattttgttacttatgctcttgatgtcatattgaagaaaccattgcccaatccaagatcattaagttttactcctatatgttcttctaatggtttgataagttttgctattccatttaggtttttgaaacattttgagttaacttttgtatgggctgtgaggtaggggtctaactacactatctcgcatgtggttatccagttgttccagcacaatatgaagaggctaccattctttccccattgaggaatcttggcacccatgtcaaaaaccaatgggctgtaatggtgagggtttatttctggactcttgattctattccattgatctctatgtgcattcttgtgccagaagcacactgttttaatgattgtagtgttttagtaagttttcaaattaggaagtgagtcctccaatttttttttccagattgttttggccattctggggtgacttttaaaaaagatgtagttcaatggttctcaaagcaggagtggttcagctctccttttttggcagtctggagacctttttaggaccttaatctaagtagataaattattcccactttcttttctgagttgctatgttacagtgtatattgacacccatgaaataattgagagaccctggaagtgcttgcctacatagtgagggacaattagttccatgatcatgggcacagaagattttgttttgggaaacaattttgttggtggagttatattcatgcttactcttttatttgtcttcatagcctgcatctccttcagacttcatatctgtttattttcttgtttgtcctctggggtttgggtgttgggtgaccagtcagctggagctggaggaggtgcttagcaaggcagtgaccctggttgggaggagcagggctcagcagggtgaaagtagctgggccttgagtcaggagtggcatctggaaggcctgactgtaagggtcagaagggccagcaggtgggtgtcctaggcacaaacggtggctgctgctgtggactggaggaaggtaagaggccccgagtattccatgttcttactggctccccaactgaggattcctctcctgggctggtgctgtcctgcagcagggaggggttagacagggacggctgcacatcaggccggagtccatgtcatcctcttaggcactgtcactacagattgaggattctgttcataagccaagcctttgcacaaggaagggacccgggctctcaaggaagagcagctcctggtcagacctccatctccttctctctcattgcctgaggcctcaagcttggtctacctggcacaggggtctggatcctcctcccagggttggggtcttactgagctgggcacctgcaggtgggagaagatctggaggggccccatctgccttcaccagattgatgttgagggtccctgagtcctgcaccactatcaggtgctgagcaacttccagtgtcagtgacaaccaccccatggtggaagcagaaccacctcgtgagaaagcacctccaagcctcagtgcttgccatgtgtgggaatttgctggtttcagttgggggcatgttggtgggtggtcatgaattcagggccggattctatgctcacagtgcacatgctggatgtggtacagaccccaggcagggctcagtggggtggttttgggtgtgcacaggtatcttttctggaggagctggtggtgatttggctcccagaagttcctgagctctgcagactcaccaagcactcaatatttgagtgaacattgggcgagagagcagaaggtaagtgtcagggcatcggggttggtgcctctgggaagaggaggaacattctgggaacaaagctctcccccggcttacagggagcttcccatcgctcctgccttgaggatcagggaaactagggcctctgctcttccaggggctgcttgcaggcagtttgctctgggagggggtgacccaggagttgcctctcattttgcatttgagatttaaaaggagaagggacagtatatcttgccaggtcacaaaaattacaggcatcatattgactgaagggcactcctgtcatcactgcaatataccagaatggtcttttaaaaaaataagtgatttaggtttaccagcaactgtaatgcttgttttattcttctagttcaccgttaatgtcacttttgtagttttagcactggcaatgttgattttatgttgactctgatgattttaagctttcatttgttcacatagagatcatcttctttctgaatattaatgcattttttctctatttctactggttattcctgtacatagagtagagaatcacttttcccaaggaggtggaaagcttctgactaccaaaaaaaaaaaaaagtgtcaaaatgctttaaagtcagtaacttaaagatcaaatccaagagtgggcaacagattctgcccagggtctgaaaggtggagaggtgactggtgaggatgtttaaaagacctctcctctctactccctaaatgggggccatccagtgttcttgaggttcagagaaggcccagggctggggcagcagggcactgtcagctcccagctcccaggggccaggagtaagaccccaacactgtccagacactgattgcattcattttgggggagagtagattcttatttaaagaataatacaaaagtctacaaatatgaacataaacagaaattcctttgctacaattttccccttaataagacattccttcctaatgacatatgtgactgcattcatggctgagatgttttctaggatggtgagagcatcagagtggactatctggtgccttggggtcatgcattttcttcttccaatgtctacaggatcccccatgtcccactttgtagtgtaactcagtgtgtgtcattctggtttttgttgtatagatccttggaaagcccatgtcattcctgctgtgaggtacaggcagccaaatggcatcatctctaaacatgccttctcctggtacatcaaattatggaataaatgaaagccattttgacagatattgaagatataagtttctactcttcccacacatgcttctcccaagtgaaggattttactggtgaattgttattagagattagtgtggatcagtgactctgccaggggaaattttgccctctaggggacatttggcaaagtctggaaacattgttggttgtcagagctgggggagggagtcctgctggcattgagtgggtggatggtgctgaacaccctgcagttcacagagccccaccagtttgaccacccaaatgtcaatgctgaggagtggagagccctgctgtgccctcccgcagcttccctgaagcttcccctcacctgctcctcccatgtctccccaccacttccccacttcacccgcctccttacacctcagtcccctccacctgaactcaccccttagtccaaggccagccctgatctccgctctcctggtctccttgctccttagcaggaggcgcccactagatggcgcccttgcccttactggagctcaccgtctccctttccaccctgagacaaatgtggctgcttttactgccacaaccccagccctccacactctagatttgctcagggagcagctcctggacagacctcagggaccccagggaggagcctcactctggagattttgatggcatggtctttgaacttcactgttacccccagtcaggatccaggatgttgggagtgcatgattctgcccggtcccacttcagcaggaccccactgctgagttgtctgtggggacccgggcctctcatctccttcttgcattgcaggagagggatcttagcactgctttcacataaagtcagataatggaggagtgcaggtgagtttgggaaggtggacatgaagagaggttgtgtccctagaggtggcagcagtgagaggatgggcaggtgggaggaacacagcccatccagggttgccagccatattaggagcgacagcctttcctctaagcctccagcctttttcctgaaacattccagaactttccacttcagcacttcccactgaggctcctcaggtctgtccctgagctcccagctgagcctacctacccatctgaaatcctgagtcctgtgtcaccctcgttccccattattctgtgcagttctgtgggacgcccagctctcctgacacccccagtcttcagaatggccatcagcgctgtcgctgtggcaccagggtgactgccgcctggaggctgagtcctggcttcctgacagctgtggggcccgctctaggctcccttgtcctgatcattcatcacctccaggatgcacagcagctgggccagggggaggagcagggacaggtgtcagccaccctgtgtgtctgcaagtcaggctgggggtgtgggaggacgccaggaatgactgaactttctgatttagagggtgagagcttgcactgatggaatttgggatttaataggaaaagcatagcgttttcctattttgtaggcagggtggctggagtttggaatcatagattcccctgggatgtcactgtggacctcagtcccacccgttaggggcacagatttcagaatccacaccctggggcaaagcaggcatgggaggctccatcagcctggccagggctctctatttgtgcagctgctgcaaggagatgtgcactctgatgggaacagtgctccctcctccttggggggcagtatctagctccctgcagcccctctccctgcaggccctgccctctctgaacctcaccttccccaacccgccccccgcaatcccatctcagctgtaatcccaacactttctcatccattatgggtggactgcttgagcccaggggttcaagactatgctggctggacaatatagcgagttgttgtctctacaaaaagacaaaaattagctgtgcatggtggcatacacctgtagtcccagtcactcaggaggctgaggtgggaggattgcttgagctggggaggctgagttggcagtgagttgagattgtgccactgtatacttcagtgtaggtaacagagcgagaccctgtctcaaaaaataaaagtaaaaaaaaaaaaagaaatatggaatacattattgttaactctaatcaaccatgctatgcaatagtccaccagtaataccagtaatagccaataatgaattatctgaaaaagaatacaatttattcttagctatctactgctaaaatttttaagctatcttttatgatagctgaaacaaaagaagtaaatttaaccaaggaagtaaaagacctttataatgaaaactgtaaaacattgatgaaataaattgaaaaagacacacgcacaaatagaagatattccatgttcatgaattggaagaactgatattgctaaaatgtccttaccacccaaagtggtctacagattcaatgcaatttctgtcaaaacaccaatgatattcttcgaagaagtagaagatcctaaaattagaaaccacaaaaattcctaaaacctgcacaaaacaccctgagttgccaaagcaatcttaaacaaatagaacaaagctagtggcattacacttcctgacaatcaaagcatactgcaaagctatagtaaccaaatcagcatggtcctggcataaaaacaagcacatagatcaatgaaacagaataaaaatcccagaaataaacccatgcatctctagctaactgattttcagccaaggagccacatgcacacaatggggaaaggacagcctcttcaataagtggtgctggggaattggatattcatatgcagaagaatgaacctagaccctatccctcaccatgcacaaaaaattaactcaaaatgtattaaataaagacttaaatgtaagaactgaaactatgaaactactagaagaaaatatagggggaaaatccatgacattggtctaggcaaagagtttttggataaaatctcaacagcataagcaacaaaaccaaatataaacaaacgggatttcatcaaactaaaaagcttttatacagcaaagaaaaaaaaggccagcagagcaaagagacaacctacaaatgggaggagaatatatttgtaaatatatacatatatatttgtaaatatatacatctgataagaagataatatccaaaatatataagaaaattatgtttctgtatagttttatctgactgggatacagaggccacatccacagtcccatcctcaaaggccacttgttcccaaaatgtcaagcacatccctcaatgatccatcatcaacacctatgtctgtaggatgaagggtgaatcatgaagcactaaaaaggaagaaggaagccaatcccaaaacaaaatgatgcagggtctggaaagtccaaagcattttttttttttttttactgcatcttcctcctttcttctccacattcccaatcctcactattgattaacaaaacaaaaaaaactgggacccaccatcttccctactgtcaggagatctagcgagattgtttgagtcttagaccaaactttgccataagccaaatttctggctgactttacaatgatatgagctagcacagtctctttttctgccagtcaacttgtgctcggttttatttgcaaccaaatagaggtggtaaccaaatataggtgaccctaaaattagtcatcaggatgaaatcctaaaatgtgcaacaaactgggttgaattcaggattagtagcaacatctctgttgtgggcttgaaaagggggcacccttttatgcagtagcaaaattgctaaattgttgtttgctgagtctttggactctcatcccggattttctatgaccattcaaacagggctgcaatgaacatctatggttgtttagcttggcacacttctacatttctatatagtaatatctagaagtgcatttgctcaatcacaagatatgcacattttataattgactgctatcgaactaccttaaatagccttaatttgttctcaacattgtttaacagggtctgtttaatgtcctacgtccagcaaggacagtatcacttttcttaatatttttcaaattattggaccttaacaaatacttaatgtgcaattaattgattcctttgtattcccatgccttcttttatatgtttccttatagtacacaaaaccacattattgtttctttacttgtgtcattccaccctggaccattcctatctaaactataacattatgagagagagagagagagaaaacaatatgaaaatataaattgattaatcaaaaaaatttaaataggacaaatcaggaagacacaagagagattttaaaattattcagagaataccacaatagctgtaccaatatattttaaaacttagatgaaacggacaactatctcgataaatgtaaattaccaaaactgactcatgaaaaaatggatattatgaatagagcaataatcagtaaagcaattaaaaagacagttgataatttttatttactgacaacaataacaaaatttcaggtcctgatatttttatggtgaattttaacaaattttcaagctcctcctcaaccaattctcagaaggtttaaaactttaacaagaaaacactttctaacacattttcagaagctgttatagcatgataccaaaaccacacaagaaaattatagaccaatctcacttacaaatatacatgcaaaatcaaacaaaatcttagtgaaccaaattcagaattaataatagcaaacaagcaaaatatgttatcatacgtatggcttatatcaggaatgcaagtatgtttcaacatcagaaaatacttctccacattaacagactaaaggagaaaaacgcttgtttaattatctcaataggtttttagagaattttgaaaattttataaagttatgcgtattctgtaaaattgatgaaatccaaccttgatttatttttaaaaattgcctttcctatagaattataggtaaaggaaacacatgcatcctcacagagctacttcaaggctaagttacttcccataagtaacgtatcctgtaatgtgtgcttggcacatattcaatactaaacaaatatttgcaaatcctcaaaccacttctcgctcaaataacccacctttgtcttttgcctttatgttagggttgattttctcaattgtatcttggagatcctttggtgggtctttcagcaattaccctgaatttgcttttctgtttacaattttaattcctgggaactctttcttgttctctgactgcacccttttcatgagagttcagccatcaatcctccagaaccccaccccccccgcccccccaaaaagcaataaagatgtctaaaagcttccttctgggctttcgaatgatgtttaccccaggcatttgttctattcgttcatcacccattttccctacaacttgcctacacttgatatcagatttttatttattagtcacctatcttcttcattggcccattttcctattttgccactggttgttctcaaatgtgttatgattcctggttgtacagtcaagtggttgataatcttggatatacgataaagatttgctctgtagctgtgtgtaagcctatataaaagcttttgtatttttcttcttaaaaaagacaaaagatggttgggaagatccctccagttcaccagttcgaggctgcagtgagctatgatagcgccgctgctctagcctgtctgtctgtgaaaaacaaggggggcggggggcgggggggaagactggagatgtaaatctcccgcagggccctacccgtatccgcaacaggtctctaacaggaacagcctcaggcctgtgttggaacaaggtaggttacagaaatctggaagccagatctgtaacttcagggtaaggactggctctcagggctgatcccccgggctgggtgtcccagaggcacccgcccccgccccttccccaaggcaggccaggacaccttcactcctctccttaggctccccacccccttctcctccccactgtgcctcctggagtagcggtggcggtgccacaggggagcggggcggggcgggctctgagggcaagggggatgggccccgccggggtcactggcggccaccctggaaactcgacgcaggccggcccttctagtgaatcgtcccagccacagctggcctcccagccgcgcttggggcgcctcggggcgcgaatggtgcaggttggggagactcaccacgcaccgtcgggggtcggtccggttattcctcaccgctcggctccagtgggcgcgcgggcctctcctcctcagttcctgcgctgcagtccctccctcacccttcgcagcttgggaatccaactgtgtcattccgacggagcgccgtgaggacctccgagggtgttagcgccaagtgatctctgtccagcgctctgaatatccaagtaaaggagttcaatgaagggcgggtcaacggaggagaaaccgtgactctctcaagggagcccaaggcctccttgtctaattagtgacgcgccaatggatggaggctcttcccaccatctcttcccagcatccagtgacaccaccgccaagggacgggctcggcggaacctgcaggaaagaagcatcggctgagcctgactgcagcgctgtgaagagacaggggaggggatcagtagttggtcccgcgcccaccccctgtttccgcgaggggcggagttgactggccatgcaggcagagggcgaaatgtgaaattccactactcctaccgtttttccctgacccgatggggcggagtgtcgtcaggctaagttccctggcggtaaggtggggagattgaggcgcacacctgccgaacggtaacgcaggattagctaaggcgagctcaggacagaagcctcccgaggagcaggagggcaaaataataaataaataaataaataataaataactcactccttggtctttatttgcggcaggaattcagaaggtgaaagcggggccttaggatctttctgaccttttgggttttaagcaggaggtgtcagaaatgttaccacagggctagctggcttgtggccagcaagcgttcacaatgccctcgatttttcatccctctctgtgggttctttttttcattgtaaggcagaatttctacgattgctcacccactcagagaacctgagctggtttagaccaggtgagacaggctaggtttaccctggtgatgatgtgttgttgccatggcgatcctgcccagtaccagaggccctgcagattcagatgcttggtgcctgtgcttggctgaggggccaatgggtgaagctgccatctgcgggatgatgactgaagcctctaagtcagaatccgcccaggctgagccttagggcagctccatggagcctcggctggcctgggatagagagtccaccactgtgccagcccccagccactgcctaggtcctgtgctgagagccccttgtccagggaaatggcgtccagtggaaaagggaccacccccttgcccttcactcaaggcaggttggtgacaaccctgaagctaatccgttcctagaggagctgcttctgggtccgagttttctctgcagcagagcagctccctggatgggatctgttcaaagtccgcctttcacgcggaattttccgtccttgcaattttccacctccaccactaggggatcctctctgaccgcctcatgccggctctggcctctgagcaggggtttctcttctgcatgtgcgaccttgcgcatgcctagtggccttttgggacctagagctgctccacaccccgatggggttacagagtgcctcgcctccactccaccccaccagggttccttccctggctgggatgggatttcagaagcgccgaggaacagcccagacaggtgtgggagagtagccaaggcccctgtcccggggtggccaggacagcggtggcctcgcataggacctggctgggctgctgcaatcagtgtcctgccccttggagagcaacagtgaaaacaacaagactatcttcacccaccttaagaaagaacagaaccagtatccccaactctgctgtgtatcccaacccaattccattccccaccccactctcagtagccaatatgcaaaatattagaatactcttactgttattattttcaaccacactctgcatcctgaaaaaccatatatttcgttatgtgcttttaaacttcttgaaaatgaaatactgaggctgggcgcagtggctgacacctgtaatcccagcacttcgggaggcggaggcaggcggatcacgaggtcaggagatcgagaccatcctggctaacacagtgaaaccccatctctactaaaaatacaaaaaattagccgggcgtggtggcgggcgcctgtagtcccagctacttgggaggctgaggcaggagaacggcgtgaacccgggaggtggagcttgcactgagccgagatcgcgccactgcactccagcctgggcgacagcgccagactctgtctccaaaaaaaaaaagaaaaaagaaatactgaattttcaaatacttgctttttttttcggtcaaaattatgttctcaaatttcactcctgtagatgtgcgtggctggctgtagtttttgcatttttattattaggtattctcctgttgcattaatatgccacattttatttctctcatgtttttggtgaccacttggggtgttttttggttttgtatttttgctgtatacatgctgccatggtggacatacctctttatacatatttcctgttgtatgcagacacaattttaggatgtgacatcttcagcttttctattgtgtcgtgtgtcttttccttcgtgctttgtgttatttacatattctggacacagattctttgtcaactgtatgtgctgcacatctctttcccagtttgtgtcttcttcttcttttttttttcttaaaaaaaactttctttatagtgttttttttttctttctttctttgttttgttttgtttttttgagatggagtcttgctctgtcacctaggctgaagtgcactggccgatctcggctcactgcaacctccgtctcctgggttcaagtgattctcctgcctcagcttcccaagtagctgggattacaggtgcctgtcaccacacccagctaatttttgtatttttagtacagatggggtttcaccatgtttgtcaggctggtctcgaactcctgacctcaggtgatccaccctctttggcctcccaaagtgttgggattacaggcgtgagccacagcacctggcctgtgttctttcttaagtagatgttacttttaatataatagaatgtatcatattttgcttttatattagtactttttctatctaattcaaacacatccccaagggtctttgtgtgtagactgaccaatttctcaagaatcatgaatgaatactgcttctctttccccaatttatctgtaatgctacctttattataaagtttctatgcatgtgtagaaatagttcctgatttttcactctgtgccaccagcataccaatagcacgctgtcttaaatattaaatagcagagctttatgagacaacttgatgtgcagtaggcaattgcccccttgttactcttcttcagggttctttgttgtaccacatgaattttagaattggcttgtccagctaaaagacaactgcaaggattttatttggaagttcataattctatacataatttggggaaagtattttcataataccaagtcttcctattaatgaacacagactctctctctctctcccccacccccacctgtttagttatttatatctttatggtctgttagttattgtttattgtctttcaaccaggtttcatgtttttctacatagaggccttgcatgtgaaagtctttcttcctagcttgctattacaaattttttttaattgcactttttgggtacagtggcttgtactgtaatccccgatacctgggaggctgaggcagatggattgcttgagtccagaagttcaagaccagcctgggcaacataatgaggtccctgtctcaaaaagtttgttttaaaaattgcatttgctgttattcaacaaatgtcattgtgtctcatatatggatttttatatctgataaccttgttcaacaatcttttgattctaacaatatatcagattcttttgagttttccatatagacaataatgtcatctgtaaattataattgtttcttctttgttatttcttggaccttttattttatatttttgtcttgctgcaaggcaatatccctctatatattgtggggtcttttttctcataaagtggggatggtgaacacccttgtcttgctctctgattgtataaagcatgctttctgtagcattttgtagacgctcttttttagattgaggtaattcacttttatttctggtttactgagtttttagcataaattcaggctgaatttgagctaaagctttttctggagacatcatttgaaaaattcatatgatttactttctttaagtcaccaaagttatgatttacattgaactgagtttctactgtttaactgtattcttgggagaaaacccacttgtcactgaacaatatctgttttatttactgctgtcttgtgtctaaattttcttttaggattttttgtatatgctcagattagcctgttattctcctttctgtatttttttctggtttgggggtcaaagttataatagcctcacaataagagctaagaaaccagccctaatggaggccggggcaggaggtttggagttcaagaccagtctgggcaaaatagtgagacccccatctctatgaaaaatagaaattagccaggcatggcagtgagtacctgtagtcctaggtacttgggagggtgaggcaggaggattgcttgagcctaggaatttgaggctgcagcgaactatgattgtgccactgtactccagcctggatgacagagcgagaccctgtctcaaaagaaaaaaaaagaagaaataaaaaggaaaagataaaagagctaagcatctgtttccttttttccattttctgggagagtatgtgtaagactgtaattaactgtttcttgaataatgggagaactctgtaaaataatctggctttggtgttacctgtattggaaggatgaaaaataccaattcagtttcattattggttgatagggctactcatgctttttgttttgttttgttttgttttgtttttgagaggaagtctctctgtattgccctgttgtccaggctgagatgcaacgttgttcacaggcctgatcctggctcactacagcttctaacttccgatctcaatagatcctcccgcctcagccttcccagtagctaggactacaagcatgcagcatcacatccagcctcttttcctgcctgacccagttctggtttcctttagttttctaggtgttcatccattttatctaatgtttaatgcatttggcataagggtgctcagtgtcctttcattgtctgttgtctgtaactgttgccattttcattcctatttatgagtactggcgtcttctctcactttttcttaataatcctgctggaactttgctttttaaagaacatcttttgacttgttgattcttttttcatacatattaactattttcttattttttgcctttatatttatttcttttcctgtttgaaacattgctcttttcttactataaaaatgggtaagtagctcatgaattaccacctcttttaaaaatcttttctactgtaagcattttagcagtttacatttgcccacaagtaccacttcagctacaccctatgtgcttttacataaagtcttcatttttggtaagacatattctcaaattttaattatcacttgtttttaaatccatgatgttttatttgaaatgttgtttctaaagatacattttctggttatacttttattcttctaatttagcacagtggccacaaaacatggtctgtgcagtgcatacaatcgatgagtaatttctgagctgtagtatttggcataatatatggcaaaatttcctaagttttccatgtgtgctttaaaaaacttccagtaaaatacataaatctgttagatcaagcttctcacattgttcaaatagtctatatgtttactgattcatttgactgcttgatttatcaattacaggtaggaatgtattcaaatctcctattaaagtgtgacactcaagtggctttttaaagacagagatgccaaaccaatgaatacatgattttccccaaagcctgcacaaattctctaatgaaattttaccatgaaagtttgtttaattaaggcttactaaagcagtatgttgtcttttactttttaaacagagaatatatattttaatacatcgtttaagtttatgattaattatctattactgaggataagaatctttgcctgtgctcattcagcatttgcacttcatttatgatctgccttctcatagcttctgttaatttttatactagagacatttatttgtttgtataaatgttgaaggtttttttttgttgttgttgtttttgagtcagagcctcgctctgtcacccaggctggagtgcagtggcatgatctcggctcactgcagcctccatctcctgggttaaagtgattctcctgcctcagcctccagagtagctgggactacaggcatgtgccaccaagcaaggctaatattttgtatttttagtagagatggggtttcgtcctgttagccagggtggtctcgatctcctgacctcatgatctacctgcctcggcctcccaaagtgctaggattacaggtgtgagccaccgtgcccagctgggttttttatattataaggagatgtaatagatagatagatgtttcaaagatagtcaaatgtttttaaaatttaaaacacttttttacaggttgactttcaccatttaatttcatctatgtgttttgccttagagaaattttaaatgctatgtagatctcatgacttataattatgaagcattttgttttctgttttccacgaaacttagcttaactttgagcatataatagttgtaaaggtaggagagtaacactgaaaaaaggaattgcataaaaatggcacattttctgtagagttgtttatcgcctgaaaataggccccatttcatggaagtaagatgatcaggctcaggtccccagacgaaactcttggcatggtttttggagatagtccagggctcagtactggctctatcatttgctacttctcccaaagtaaccaatatctcatccaccctgagcccatttccatatctctaacatgaggataatagcatctaccttacacaccaagtagagggatcaaatgtaggaactaaatcaaagtaccagcactgaataacctacatcctcccacttcccaaaaggaagagagatgtatcccctgttgacaaacgagaccattttgcaggagagaaaggaaatgccagttcacttgcaatgtaaacatgctctctctttttagggatgtccagggacctgagagagaacccatgcttaccaaagagtttctagttccagacacacaggactcgaagggtgacaagtatggttttcagggtccctgaatccacccagtcctcacagaaactcctaaaagctgtcgattgacagcgttgagttcacagctctggtcctcacatgctgatactgcttgtgatatcgaacccgacaggaccccacatcacaattgatttaccaactacaatataatacctcctgaatctccaaattggctcacccaggaacaaaggcttggggtaaaactggattaggagatataagctctgaattttctgagggtgagacacacaaggattctaagtgacacgccacagagtaacgggtctgtgactggaggacccacagatttgtcttactggagacaccacatgcacacaaactccatccttagctgtggaaacaagggtcttttgctatcttagccgaattctgggagtaatttttggaggggaggagatctttgggattgcctctttcaggccctttacaaaaatacctacttcttaaatggtaaagcttacactaaactgaaaaaattacatccttggctttttatgaagtaggtgttggattgaatcactactggaagaagtatggcatcgcaaattctaagcagtggtcaaaggatggatctgttaaattagaaaaatctctaaatttataaaaagattttagattcctttattctaaacaattgacctatttgtactcatgggacaatcaaatttcaaaggagatatgtaacgatttcatggcttgcattaaaaatccttctgataaaattaaagataaaaaatctgaccccctgccaaaaaaatcttttgaagttcatactgcctgctttcaatattctgtgggattcacaatgaaaggtgccttatattgtggcctagcttcaagtttatgccttcgccaccatggcctgggttcaattcccagtcagggccccagcgcctttggtttaatgtttgcgtggcatttgacttttttacctatttagtattggtgagattacctttggtaaaaaaaagtttaaagagtggaaatcgcaattctttgtgttggctaaaatctgattataagagatctggaaggttttatttttctttttcaaagagctctatggtcagaagtcggcttcatgaaaagctaatatttaattatatgtacatacagtctttctggattttctcttttgcctcctgttttgaaaaatatttggatttgagtgaaactccgttttagaaattaattgcttggtacaatatacccatgtaactaccctgcacatgtaccccctgaatctataataagagttgaaattttgacaaaataaaattagattttgaattaaaacaaataggtgcttggttcctctgctcacttctttttaaaaggaattcctctcccatgtacttcttcttttcccttctttaccttccttttggcatctttggtatcacatgaagggatctagagggaattttaagtgactctgaaattccttgagaaatacacaaaaagatcccactcaccccttttgggggtctcctgttctccttgtggagtccagagtcagggacaggctcctccaggtctgcagctctgctctcttttatttcatcttggctgattgctttggttttgtgagtaccaggcattactttgtactgtgagagacacgtcctttgtgagtgcaacggctgctgggtcactggtgagggctgcagtttggagatggctgagagccgttgcaataaatggttgtgattgcagggggctccttgtttctttgcaagtttagatgagaaaggtgcagtttggacacagtttaaaggctgtgaaaacaccaccaatgaatatgatttcctttggggatggtctgattaaaagtgggctgattgttgctgtgctactagccttgaagacatgtttctacagcattgtgcagtgtggaaaaattgtgtggcttggtcttgtggcatgtcccttcttttagagacctcagattcaatgtgaaattcgggatttttgattttcaaagatctagatgccctgccttccagatgtgcctactcttcacatattttaaaattagatcctataaactgcaaatactttgttggcttctgtgagatcagaggtccagttagaaaaggaagacagtttgttaaaattaaaaactatttatctaatctaactagattggcctccaaatatgactttctgacattcagctggttactctgaaaagatttctaaatctcttgaggctcatctatatgtttccttgcaaagaaaaaaaaaaaaaaaaaaaagcaagcccaagcactagtaagaaaaagatttgcaatgtttcatgaaaggagtagatgagtgaagcatttatttgtagatactgggttggatacctgtgcaaagaagaagaggtcaataataaaaattgccaggggatttcttggaacttaacaagctgaattaaatatagaaatgtcaggaaatcaaggcaggaaatactcacttgtggttaggcagacagggcagggttctgagcttgagatggagcaaacagttgtggtgggtgaagttcacatgctttagagctcagctgtcctagtaaagaagcctaagagtctctaaagctcttatgagaagatggattttttttgcctagattaaaaggttaaagaattgctttaagttggataaaataaagctaaatgtttaagcaagttgtgaaaggtttatgaaaaaattaattaaaatatttttgtgtgtaaacatattgactaaagttgaaggggtataattcagcatttctgtaaattgagcattgaaataaaaacacaatgggtttctcttagagcactaacctgctctttaacaaaaattgtaaagggttatagaaagtctataaaaatgttaccttatggtcaaacattaaaattgggtaaatatgtctatcaggttttattaagaattaggtttaacattaatagtacactaatgtaaaggtgaaatttggcttatttggtacaaaaatcatacaggaagcattgtgaaatataaaatgatttttagctttctttgggctatatttctataaatatgttattgatgagggttccaaagttatgggagactcctataattctgctatatctcagtgtacattatcagtcataattataattgtcatgttaaattattgtgggccacagaggtaacagatttccttgtcaattgtgtctttgactatgactaccctaaaacgttcagtcacccatatacacatgttaccttgttttggccctctttagaaggtaattttataatcagctataaagccctaacaggtgctcttaaatgcaaattttgataactttggagattgtgacatcagaagagaggaaaaatgttcgggacacttggagagctaaaatgttcattgatatcaagcaggacaggaattaactgcatgaagtgaactaataggaggctgaagtgatctttttgactttttgcttaaaacgttgctgatcctttgttttgcttttcagagtcaaggcaaattttcttttgagctattgacagcttttaacgattaatcaaaatatactcctatgaacaccatttggagcattatttgtttctctctacccgatttccccagaatttggaaactatttgtgggtattcttaatttatggcaatatagttatttgcataagtgcaataagaatgtgttttctttggtaacaggacacaatttgaaaaactggttattttaccaaggttttgaccagaatgctgtgctttcctttaaggaatcaaacttgacttgtggagctaataaagcctttggaaaactgaccttatatcctgtgaacacagtccctgtacagggttactgatctgtgggaagaaaagaatgtcacattctgacaggtcaggaatcccaagttatcttgaaacttcaagaggacaggaattcacccaaccatatgtatttgatggtagaaatccatggcaggggctcagctttaaaaagtcttatctcagattccttctataaaacaaagtcccattaaaaccaattttaaaagcctatgtgaaaaataattattcttgctgcacctcgtacaaataaagtggcaaagcataataaagcaaattggtcctgtcgtaatttgtctttagtaaaaacgggaaactggggtcgggtgcagtggctcactcctgtaatcccagcactttgggaggctgaggtgggcagatcatctgaggtcaggagttcaagaccagcctggccaacatggtgaaaccccatctctacaaaaatacaaaaatgagccgggcatgatggcgggtgcctgtaatcccagctactcaaggggctgaggcagggaagcggaggttacagtgagtcaagatcgtgccacttcacgacagcctgggtgacagagcaagactccatctcaacaacaacaacaaaaaagggtaactggagagagggaagttatgtttcaaaaacttttggaaactatagtacacctgtttttaaattctagtctggcattcagtttttattattttctacagtttgggttaaattcgtatttctctggctacaagtctcctaaataatcttttcatttgtttcctttttctttccctttttccccatttttcttaattggaaatcactgaaacctaagctgtgctttcttaaagccctgtgaactgaagactagacaaccgaaacttctgaaggaagtagcagcaacctatttatatgtgttgctgttgcctactattatgttttagcaggtgctgcctctacacccccgaaacagagagtgctactgggaacaaatcgactttttccactccagtgctgcattcggtgccccataacgatgaccccctctcagcaggaagtagccagaaagattacaatgctccatctccctatgattcttgtgataaataaatatacaagcatgatagaaatcatgcgcaaattgacagtggggattgtggcaggccagatttcactaatggaggtccccatcacaactacttcagtactgactgagtggttaagttcagtatcaaaagctgaaagtgccagcgcctttctacaaaggctagaatgtaacaaaagcccaccaagggttttacctaggcctttcctgggccttacagcatgacaaaacaaagaaggaattcttaaccagacctgtttaggattaaacaaatttaattgggggtctgaagaaactcgccaggcctccacaaacaagttcattgggggtctaaaggaaccccccccaaacctctgtgattgagcaggagacaaggtcagggtaattgccccagcacctggactcatttagatttaagtaaatgtactgaggctccagagaaaggtctccaagacttagactagagttacagattaaaagaagttaatcacttatatctttagataaatgcacactgacacgtagacatacatcttagaaaatatataagctctggaaaaccttgtaatttacagttggtctggagatattttctgggccttctctctgtaaccggttccagaaataaaaaactctcttcctccccagtttatctgcatctcgttattgggccgtgagaaatagcagccagaccctgagtttggtctgggaacacactggctgggcttcctgcctggcggtagagcttcactgtcctccttcccagccaaaatgtggcccttgaaggcttcctccccaactgaccggttttgggttctaggtactcagggaacaccgtcttcaaggaggccattttcatactgttcctggtttgatttttctgaaattaggaaatgccccttgaggcatccaggattgtctttatttcccctgaagcttcccctcctgaagaaaaaagttctcaaacaccctcaggactcaaaccccaagttcaccctgtgaaacattcccatttcctaaacccaggcaggctcatggccctcagcctctcagaccccatggaaacctcctcccccacttcacgggttctctccatattgagagcctcccctcctcggcacacaacccagagactcaccccaacatgtgtagcaaatcaccctggaaacaatcatggctgaacgtggtagcccatgcctgtaatcccagcactttgggaggcccaggaggtggatcacctgaggtcgggagttcgagaccagcgaggccaacatggtgaaacctcgactctactaaaaatacaaagttcactgggcattgtggtgtgtacctgtaatctcaactactcaggaggctgaggcaggagaatcacttaaacctgggagacagagattgcagagagccaagatcgcaccattacactccagcctgggcaagaagagtgaaactacatctaaaaaaaaaaaaaaaaaaaggaaaaggaaaagaaaaaaaaaatcatgaggcaacattgcatttaacaatattttatttatcaaaagacacttgtctttctcaggtaagtgaaggtctagagatgaaacgagtcccgatgtaaattgccccatgggcattgctgagatcacaagatcatcactgcagcatgcagcacaatagtaaatttctcaggatggaagttcaacaatccaaaaggtagtattttttttcatgatgctcagtccatcatacgaaataaaaataaattccttttcatgatcatccattcagtagaaaaaatgatagtaaatttgttctcatgaagatttttaccgtaacatataggatttatcgttattattattattctttgttttttgtttttttgaagcggagtctcactctgttacccagtctggagtgcagtcgtgcgatctgggcacactattaacctccacctccagggttcaagcatttctcctgcctcagcttcccgagtagctgggattacaggcatgcgccaccacacccggctaattttcgtatttttactagagatggggtttcaccgcattggtcgagctggatttgagctccggacctcgggtcatccgcccatctcagcctcccaaagtgctgggattacaggcgtgagccaccgcgcccggcctcaatttatcattattcacgcatccacaaactgggttcttatattttgtacgtgattttttccattgaggagagatatctgtgcatattcatgctgctcatatttcatccacaaactcggttcatatttcatccacaaacataattttttccgttgagaagagatacttgtacatatttatgctgttcaaattcacatttcatcattcttttacaagaaatagataatgtattttaaggttttccagtggtattacagatattttactgggtgtatagatagaaattaaaccaaacttctttgttctggccgccagtcatgcatcctgttttcaacatagttcacatacaactggttgtgtaaaaatgaaattattttgtttagtacaatcatcaacagttggttgattagatttttaattatcaagttaatcattgtcattatgcttctcatcgcactcgtcattaattgctgtgggaggaaatttgttatgttccctatgagagggtgtatcacaaattcaaataagaattcaacgacaatggactgtataaaggaaataagcaagtccatggaaaacatatttttttccggaaaggattaaaatatttttaaaaaggaattaaaaaaaaattgggcacggtggcaaatgcctagagtcccagctgctcaggagatggagacagaaggattgcttgagcccaggaataagttggaggctgtagtgaacagtgattccaccactgtactccagccagggcaatagagggaaaccctctttctaaaaagacaaaaagaaacaaaacaaaacaaaaaaacaccacatcaaaaaacccaacaacaaaatgaaaaaccaaataacagcaatacaattggagctattcgatccaaagaagtaaatgaaacataaagcaaataaaagagaaaagctaatacctgtgtcctgcaggactcagtccaagttctgctctgactccctcctggtgagccaccccttaaaaagtcacttggggcggggttactttgacagacagtcttctgtcaaagagggaggcggtaaatagcacttttttttttttaatttaacgcctttccaacaaattagcggctatgttgtctaagagtgcaaatgtcagaggtgggtacaggcagcaagaccctccccacaggggcagcagaaggaggaatgactaagggaacaagactttagtgtgctcaactacacaggacaggaaacagatgctttttacaaaagctggtggacttgaaggcagaatattttcaagttcctgtaactgcgaactatgacctgtagcctgtgagagtgactttctgtggcaaaggagcttttgtgaatgtgaggaagttaattatcttaacagtgggaggttctcccggcttatctagctagaccctcgtgaaatcccaagtgtccttaggaaggggaagcagagagagatttgagtccagaagaggaagaaggtgatgtgaggcccagtaggggaacaaagggcgatggcatgtaaacacttagcccccagaagtgggagagggctggggttcatcacaccagaatccctaacaatcagccttattttaattacccttgaaatggaaggaggccttagagagccagaggcttggaggggcaccctctgctgcatacacagatcccaactgctgtgggctccaaataattgcaccagggaaatcacaaattatcaaaaataaaggatgtaaagcttttaaaaaatattaaaagcccaacaaataaaaaaagttctaaatctataaaattgacctcagtctgtatatttagatgagtcatgtgtatatagcgtttcacttcaaaatatatgataaatctctcattcattggcttaaaaataaacacttcaatcaagtctttatcagaaaaattgaaacgttaactcaattgccttttagttcatgtgactttacaaaacttaaaacaataaagtcagttttaaaaattattagtaaagtaaaagaaaaatatcttcacaatgtagacattttgtccacatgagacatgtgaaatattgccattactaaatatttgcaggtcaaaaactgtttccaaaacattttaaataatcatctggcctgtctgttttagagcattcaattctagctgaggtctggggacatgtgaaaggagccacggcccgactccgtgctgggaagagtcagacattttccacagctctgtcctttgctgtgggctctgcaactcctaccaattaaaattgcttacgtttttgttttatttttactaaagaggggttcctaaaagctaacattatactgagtatatgtaactaaaactactaagaaaacaatttcacaattatacaaatgtgccaagtaaatgaaaaaataaactgtattttaataaaggttataaaaagaaaaacatatagtggtgtgaggactgtctcaggtcttcactgagcaagggatcatgacattctatggcggacagctgaccttggctttctgctcctcttgattatgtctactaagtgacatacttactctttttccacctgtcttgcctctaagggtaacaggttttatgagatccctcctagtgctttgcaggtcagcctccctttgctgcattccaattttactgcctataccctccagctggcttttgatgacaaaagtcctggtcccagccattctcagattctgtcatccccgtgggcactatggagctcagcactatgggaggttccccaaaaatctcgttttctatgaggaatggccaccacctgcatctcagtgatgctagtgacccctttcctactcctgtgctcactggtcctcatgaagatcctggttggtctgtagccccctatttttcctattaaagagaaattacagtaagacccatttgtgtgcaaaatcaattttaggcttattacacttggcctgataatttgcataaaatgcagcaagaattcatcggccatataggctacttttgagttaattttcctgggtttttacctaaaaatatactattttggttagagtcttgtgaaaataaccaatgtgttcaattgttttattttaaaaggctcttactgaacactataaatatgtataagttgaatatacaaactatattgtcataaaatcacaacccaaaatgtggagaacgcagagggaaaggtaaatttgctcgcaaaaacatacttcacccaaataactggaaaaaaaaaaagactttcatgacccttctttaaccagagcagcagctttcaaacaaggtgtttgccttggaaatgccattcacaagccaaacggcccttgagagctgtctgtcaggcactgtagaatctagcagctcctcacagagttagaaatagtttcaggaaagagattccctgcttttagtaactgcactttatattcccagatagcgagattgtatgtaaaccatttttatcttattctggaactcttttgggtactttttttttttttttttaaatgatggagtctggctctgttgctcaggctggggtgtagtggtgcgatttcagggtatgagaaaatgcagctggacctggctctttccaggaagaccctcacagccaaggagtccaaagcctggggttttcatctaattccagtgtgactggggtaggagcagctttggtgctgggtgtgtgtgtgtgtgtgtgtgtgtgtgtgtgtgtctatgcctgtgtctgtttagggtgttaggctcgtggttgtctagatacaaatgtcccagggctcaggagccccagggttatgtcaggggcaccagatgaaggtgtcaacagaagttagggcacaagggacaaaggtgagagcaaggttagattcatttaggtgcaagaaatcatagagggaggagggagaggaagccctcctgctaccaccgaggaagaagcgcagcttaaggcagaaagcctgtccggagaggaagtgagtttgagggcagggctctctgggtaaagtacggtctgggacaccagcctgggggaagggtacagaatgcagagtggcctggcgtggggactaagaacagaggagagcagctttcactgggagggtcagtgttttcagtgtccagcactgagcaaggtgagatttgggcagcttgctgtgaaataaggtcaggctctggcattgtccccattgcgtgtgtgtgtgaggggcactttgggagagtgaactctccacctccatcctctcatacgtccttcaaccgagcttgccagttaccctgattccaaggagatctatttattgttgacaatactggatcctagcagaggctgggtaggagcctgggcacaagcaagtggaggagggggcctgggcctgaaagacctgggaggtttgagagaggacacagcccacagaatggagcagatggggtagagtcggcaagcattcagggctcctagtaagttggacaatggagaccctgaaagatccagtaaaacggggagaacaaacaggtccccaactcacatccttgcagtgcctggagcttcagactccagacaggtggggaaggaaaattgagggatgtgaacatgttggagaatgtcgtgccctgaagaatgaagaaaaggggggtgaggaatgagagcaggaacggcttccagtgcctggtgcccaggagaactcagaaaatgggtgtggtggagaggaatcgaggaaccggaagtggtggaagtgtgcagggcccctccgagatcactgtgactgccaggcgtcctccctggctggagagcttcactgtcctccttcccagccaaaatgtgtcccttgaaagcttcctccccaatggactggttctgggtcctatatatttgaaggggtggcctgcctctccacacctgtgggtatttctagttgggtgggaggagagacagagaaaagaaataagacacagagacaaagtataaagaaacaacagtgggtccaggggaccagcactcagcacaccaagggcctgcaccggcaccggcctctgagtttcctcagtttttattgattattattttcattatttcagcaaaaaggaatgtagtaggagagcagggtgataataaggagaaggtcaatgaaaaacatgtgagcaaaagaatctatatcataattaagttcaagggaaagtactatgcctggacgtgcactcaggccagatttatgtttctctccacccaaacatctcagtggagtaaagaataacaaggcagtattactgcaaacatgtctcacctcccgccacagggcagcttttctcctatctcagagttgaacaaatgtacaattgggttttacaccgagacattcagttctgaggggcaagcaggagacagtggccttcctccatctcgactgcaagaggctttcctcttttactaatccacctcagcacagaccctttatgggtgttgggctgggggacagtcaggtccttctcatcccatgaggccatatttcagactatcacatggggagaaaccttggacaataccccgctttcaagggcagaggtccctgcggctttccacagtgtattgtgcccctggtttattgagactagagaatggcaatgacctttaccaagtatactgcttgtaaatattttgttaacaaggcacatcctgcacagccctaggtcccttaaaccttgatttcatacaacacatgtttttgtgagctccaagttgggtcaaagtggctgggtcaaagtggctggggcaaagctacaaattaacaacatctcagcaaagccattgttcaaagtacaggtctttttcaaaatggagtctcttatgtctttcctttctacatggacacagtgacagtctgatctctctttcctttccctacatatattcatggaccacagtcttcaaggagtccatttcctcactgtttttggtttgatttctctgaaattaggaaatgccccattgaggcacccaggattgtctttacttcccccagagcttccactcctgaggcaggagcttctcaaacaccccccaagactcaacacctaatttcaccctctgaaaccttcccatttcttaaatccaggcagggtcatggtccttagcccctcagatgctgtggagaccttctttccctttcatacattctctcaagattaaaagccacccctcctcagcacacaccccagagactcaccccaacatgcattgcaaatcaccctggaaacagtcataagaccacactcatttaataatattttatttatcaaaagacactctttctcaggtaagtgaagttctggagaggaaaagaggagtcctgatgtaaattgccctgcaggccttgctgagatcacaaggagattgttactgcagcttgtagcacaatagtaaatttcttctctggatggaagttcaacaatccagatcgtagtatattccttttcattatgctcagtccagcaaatgtgatgataacaaattccttttcatgatcatccattcagcagagaaaatgtttgtaaatgtgttttcatgaagatgtttaccataacatacaggatttaccattatcaatgcatccacaaactctgctgttgttttttatacataattttttccatcgagaagtgatagttgtacatattcatgctgttcatatttcaaccacaaactctgctggtttttttatacgtaattttttccattgagaagtgatacttgtacatatttgtgctgttcatatttcatgtttcatcatccttttacaataaataggttatattgtattttaagtttttctaactgtagtgcagaaattgtactgggtgtatacatagatatcaaaccaaatttacttgttctggctgataatgcatcatttatttcatagattatgtatttctttgacacatttcacgtacaactaattgcataaaaatgaattttcttttagtatagacatcagcatgtgcttaattcggaatttaattgttgagttaaacatcgtcattgccttttccgttgttattaattgctctggtgggaattttgttatctcatacataagacagtgtgccacaatatctcttaaaatttcaatggcaataaactttatatttaaaaacagggaatctatggaaaacacatttttttctaaaggattaaaatatttttttaaaataattttctaaaaagttaggcacggtagcaaacgtctagagtcccagctactcaggaggctgagacaggaggattgcttaagcctacgagttgggggctgcagtgaactgtgattgcaccactacattccagccagggcaatagaagttaaccctttttctaaaaaaaaaaaaaaaagaaagaaagaaagaaaaaaagcaacaacaccaaaacctcaccaacaaaatggtaaagaaaaaaaaaacagcaatacaatgtaagctatttgatccaaagaagtcaatgaaatttaaaacaaatgaaagggaaaaagtaatacttgagtcctgcaggactcagtccaagttctgctgtgcctccctcacggtgagccacccctttagaagtcacttgggtcataagttaacccgataggaagtgtcctggccaatgaactagggaggtggtaaatggcaccattttaaatttaaattcacggccttttcaacggatcagtagccatgttgggtaagagtgcaaatgtcagaggtgaaaagaggcagcaggaccctcccctagtgcttgggcaacagaaggtggaatcactaaggggacaagactttagcatgctcaagtacacaggacagaaaacatgctttttacaaaagctggtaaatatgaagagggaacattttcaagttcctgtaaccaagaactaccgcctgtaaccggtgaaagtgactttctatggcaaaagcgtttttgaaaaggtgaggaagttaaatatcttaatgttgggaggttcttctggtttatctggctagaccctaatggaatcccaagtgtccttatggagcggggagcagagagagagatttgagtccagacgaggaagaaggtgatgtgagtctgggtgcgggacagggggagaatgatgctatgtggggatctgggctggggaatgacttagctgcatgagcggagtgacttagactcctgaactagaagaaatctagggctcatcacctcagcagccctaaccatcaaccttatttttattacaggtcttccatcgacggactccctaaaaagccagcggcgtggaggggcgccctctattggacaaatagatcttgactactttcggccctcaaatagcctgactaggcaaataacaaataataataatttttttttaaatcatggaaaatattttaaaaaacaattaaaaagttataaatctataaaatctgcttctgtctgtgtgtctgtatatttagatgtctcatgtgtacataatgtttcactaccaaaatatatgatgaaaccctcattaatcggcttagaaaactaaacacctaaatattttctcagaaaatacaaaaactttaactcaaatcccttttaattcacctgactttaaaaatctttaaaaaataaagcatgctttaaaattattagtaaagtaaaattagaacatcttcagaatttagacatttggtttaaattatacaggtcaaatactgcccttagtaaatattttcaggtcataaacaactcctgtaatcttttaaataattgaattacatgtctgttttagagctttaagttctagctaaagcctggggacaaatgaagggcaccatgccccctctctgtgctggaaagagacattttctacagctctgacccttgcagtaggctttgcaactgctacctatcaaaattgcctacatcctaagtttattattaaaaggagttgcttggagttaacattataatgaatatatgtaactaaaactatttctcatacaaagtatatgaaaaagtagaatgtatttttaataaaaagttataaaaagacatgaacatgtagtttttataaaaaacagtaattttgtctagttttgcagttctaaaaagttatgttaaattcaaaaataaaaaataacaagacaagactcaaggtttaaataagttgtaaaagatttgtaaaaattagttctataaaaattttacaaaaaaaagcattggttaaaatttaaggaattattttgtttttacagaaattaaacattcattaaaaacactctgatacaaggccttaatttgggttcatgtatcagaatagcagggttttcttagaatattaatctattctttaaaagaactatgaatgttatgcaaactttataaaaatcttaccttagagtcaaactgattaaaattccatagattttacgtaaaattttattaaaaattaacttcaacaaaaataaaatttgattttctcctttaaacaaaagttttgcgtaatattaaataataaagcatttttgtttaccttttaaactataaacacacacacacatacacatacaccaacactaaagtcagctgacctcatactgtctttattggatattcttgtttaaaaaactatcttctttggaaaataaagttttttattttaaaccatattttaaattatcattttgactaaatccataacatacagtgatctgtaataattctattttataatatcaagtgttttgaagaactccaggaacagccatgagagaacactgtggtttagtaacactttatttcctcagtttgaaaatagttgtctttcttggggaggccggtttcagcagatgaaaacaagagtcatgatgaaaattacccagcagtggttagtgtgaccataggaacattgtcatcaggtcagcagaaaacatatcagcaaatttttctcatactggcagtgtgtaggggtggatgtttacagttcctgaagccccagtggtcgtgtggtcttttagttttgccatttataggcaacttgtggtaactagctcaattagacacattccttatcacaaggacagagggctttctgtatcctagggttcttgccttggcattccagaagaatcaggtcacacgtggacgtggagaatgagtgcaaggttttattgagtggaagtagctctcagcagatgggggagccagaaaggagattggtttctccctggattggggccgttcagcagccctggctctcctctgactgccccaggcaaaatccacatcgttctataagtcggtgccctgctggtgtgctggtgcctgttgtcatgttcctcttcatgtccagccgcctgtgtgttcctccgctgatgtgctcctctcgacgtcaagcctcctgtgtgtctgactgctagggtcttggggtttttataagcacaggatgggtcttagcaggccaggatgatcttgggaaagacaacattcggtcaggaaaacaaaaatgcctgttgtcatctaggtccgtggggacaagcccaggtgtggagcttttagccagggaccacagcctcctgtatccaacacttcccttcaccttttctatatcattcaaagggatcatgcccttcccatcccagcacttcactttcatgtcatttgccccctctgaagaggtacatctaactgccattagaatatggatgatgaccagtcttagctgcttcctgctgaaagggggcattgttttgggggaaaacggcagtcagattcctcccaggggtctctataataaaagatcgaggtggctactttcaggaggtcctctaatgtactatctggtcccaagtcccatttctgcaacctcctcctgatgtcaggagctgcctgagtaataattttatcctttaggattatctgtccctcgattgaattaggagatagagaggtgtgatttaccaaggcctctcttagcctctccaggaaggcagtgggattttcatcaaatccctggttaattatggacaacttagtataattgagaggcttggtcttagacctacgtaagccctctattatgcacacctgaaagtgtctcctcttccagtcttccatctcattattgggatcccatttagggtccttcactggtgctacttctcttccagttggataatattcgctcccttccctgatgctataggtgatgcaaagctcatccccaaatctctctgctgctggcagagcagcctgcttctcagtgtctatcaggttctgactcaaaagtaacataacgtctctccaggagagttcaaatgttagggtgaaattctggaaagcttctatatatctatcagggtcatctgaacacttgcccagatctcccttaatttgctttaagtcttgtagggaaaagaggacttggaccttactgggcccaaattcactgggcatctgtaggaggggcaagagtgagactgggcttgtttgggatgaagatttctaggaggggccaggtgagaggctgaagctggatacggaggttggggtggacccagaggagcagggcttgagggagctggcacgtcagctgggggtgcgtctgggactcgtgtctttaattccctgggcttgaccctggcagccttccccgagacagcaaacaggagggctggaacaatcctacatgtcagcaaaggtctggattgctttgcaaggtatagaaagcctgcacatttggggcctcagaccatgtgtcctcacatccagagaaaagttctaattgcaggatggtattgaaatgaatggtcccttcctgaagccaagccagtccttcctgtaaaccataatttggccaaacctatgtgcggagggctatgagatgcttttcctctggattctgagggtcaaaacagtcccaatggttcaggatacactcaaggggagtacaagctgggggtggtgaggagaactggctgcccattctgaaagacagggaatagaggtgttcctcatttcccttccttcttttggcaaaaagctcagggtgtgatggggagggaaagcaagcatcttcacttcactttccacctcttacccctgcgccctggcaaccttggcaggtgccggccacaggtacaaatgcggtatgtacccatgaagcagggagaacctggagattaggaattaactgccctcacctatgtttccttttctccctgctgttgaaaaactttgagttccctgggcctttttatcccatgaggcatggcctccttctgtgggatggggttcagtcagcaggaattggtcctgtccatttacattgtgcctgttgcctggctttgaattcctcagacctgctttctctttctagggcctcagcctgaagcttggaattgagtttgggactgaaaaagcatttcagaggctgtttatatccatttagtgcctcaaataagccctgctgaatttgcaattatcagccagcaggggtcactcctctgttaacttccctattagaaacagagcggtggggattctcacttagaaaagaaaaaaagagaaaaacagttaaagaggcaaaaagtggggaatgctgggggaagaaccccttgcttagtgcaagtgggcccctctaatccttataactttcccatccttcccccagttcagaccaggttgaattccttggccatggaaggaaaggttccattgatgcagtgggtgagaagcactctgtagggtcctggctaccatcggttttctcacacccccctcatcccaggcagtggagggagacacttctgcgacattgctccccctgccccttcatggctattgggtgtggcctttgcctgctgcaggcatgcctaggtgctggagctgggagggaaaagggtaaggagaggtgccctggaagccgctcatgcctggggctgtcaaggtggaggcatacatggcacctctaggaaaaattggtctgatttgcacctttggcggctgagccaaatgctcattttacttagtaacattgcctcagcctgtagcaaaactcttaacattataaaggaagagataagatccatttcaaataatgtgtgagagagaaaagagatgaaaggaaaacagagtcttttacctgcaggaaagggagagaagtggcagagttttggaagaaaggcaggcccaacagtttcccattcactcacactcaccttccgagatcccagacgagccaccagttgaaatgggaaaagtttccttgtccccctcacaggaggtggagtgggggtgtggcttgcttctttagtactccgctgctcaaacctctagggaagcatacagactggcaagttgtggggctacaaccccatggcagcatctaggggtagatgtttacagctgctgaagccccagtggacatgtggtaccatgtgctcttttagttttgccatctataggtggctttgtggtaaccagctcaattagacccattccttaacccaaagacagagggctttctgtatcccgcggttgttacctaggtgtaccagaaaaatcaaatcacacgtggtcttggagaatgagtgcaaggttttattgagtggaagtagctctcagcagatgggggagccaaaagggagaatagttttcccctgaagtcgggttattcagcggcccaggctctcctctggctgccccagccaaactctatgtcaatccattggtcggtggcctgccagagtgctggtgcctgttggtggattcctctcagcgtcgagagtttttccctctcaggaaagggagagaagtggcagccacccatgtgttcttgcactgatgtgctcctctcgacgtccaacctcctgtgtgtctgcctgctagggtcccagagtttttttaggcacaggatagggcatggtgggccagggtgatcttgggaaatgcaacatttggtcaggaaaacaaaaatgcctgtcctcatctaggtccaggggcacaagcccaggtttggagccctagccagggaccccggcctcctctacccatcactttccttcaccttttctgtatcattcaaagggaccatgcccttcccttcccagcacttctcttctgtatcaataggtgatgtttttaaaatttcccaactctagtgcaggcatggtactagacatatacatagaaataaaaccacacttattcttctggctggcaagacatagtatttttgccaaattatgtgttgttttgaagcattttatgtacccctggtcatataaaaataaagctattttgttcagtacaaacagcagcattttctggattagaaagttaatcatcttaaaagatcatcacggatttttccattgcactcatcactaattgctttggcaaaaaatttcttatctcacgcatgacaaaatcagccgcagtatctcctagtaatttaatggtgatgatctttataaaggaaataagcacatcaagggaaaacataattttttttaaaaaaagagtaataaaactttttaaaagtcttttttaaaagactgcttttctaaaatagtaaaataaaactccaccaataaaaccaccaacaaaacagaaaagaaaaaataatgatatgatcggagctatttgatgaaagatggtaaattaaatttaaaatgattagaagagaaaaagcaatacctgtctcccgtaggtctcagtccaggttctgctatgcctttctcctggtgagccacctatttaagagtcgcttaaagcatatgttaatccaacaacagcagattaaaaaccaatgcaatctgaactatttgatctaaaaacataaataaaatttaaaacaaataaaagagaaaaagcagtacctgtgtcctgtaggtctcagtccaagatctgctctgactcccttgtggtgagttagccctttagaagtcacttggggtggggcatatgttaattccactaacattggttctggccaatgagtcaggaaggtggtaaatggcaccttttcttcttgctgatttctttcagttcctttggagtctggacattagtcctttgtcagatgcctagtttgtgactactgtttcctatactgtgggttgtgtgtttaccctgctgatatttcttctgccttgcagaagattttcggtttcattaggtcctattgatcttattctatttttatatttttgcgtttgcttttggggcattagtcatgactacttggcctaagccaatgtctagaaaagctttttggatgctatcttgtagcatttttagactttcaggtcttagatggaagtttttatatgctttgttaaagatcaggtgactgaaagtaccgggctttgtttctcggttctctattctgttccattgctctatgtgcctatttttatacttcctgcaccatttattgaataaagtgtcctttccccaattagtgtttttgcatactttgttgaagattagttgtctgtaagcatttggctttatttctgggttctctattctgttccattgctctatgtgcctatttttatacttcctgcaccatttattgaataaagtatcctttccccaattaatgtttttgtgtactttgttgaagattagttgtctgtaagcatttggctttatttctgggttctctattctgttctattgctctatgtgcatattttataccagtatcatgctattttggtgattgtagccttgtagtataatttaaagcctgccttcagatttgttctttttgcaaagtattgctttggatatgcggtcacgtttttggttttgtataaattttaggattcttttttctagttctgggaaggagaatgatgatattttgatgagaattctactgctctgtagatggctttggagagtatggtcactttcacaatattgattctacctattcataagcttataatgtgttcccatttgtttgtgtcaactgtgatttctttcagcactattttgtagttttccttgtaggaaacttacattaacctacttggttaagtatatttctaagtattttacttattaaaaattctcagggaaatgcaaagtaaaactgaggtgggaaattaaagaaaaataaaattaaaaagaaagggaaataagctttcttgtattaagctaacttgtcccagaggcagcaacaggcacagcccagacccaggaaaagtcttgataatattatttattgtattctggagactcttccagcactccttcaatgtagggagaagaaaaacaaattttcctttgttttatggtatgagtttatagattcttgttctctttaactagtaacttcaagtattctgttttatctaagaagtatggcaaaggtcatgagaagcctgagcaggcctgaactacagctctctaggcaccatagtgaagataaaccaatgcaagcctctttagagcaaaacctagataatagacatctgggttgcatagcaacagttatgtgcaatcctgagttatgaacctgttacaatttgattaactgtctttttcctgcctctgtatccctgctttcacaccactgtaagcttgcttcaagctggcccacccccttttgtgaagtgtgtataaaagtcaagtgctgtctttgttccaggccctgtctttggacgtgagtctgctgggcctgagagcactcaataaaagattctcctgttttaacccaaagcctctctctcatcctcctaaatcccacaacaaaaccacaatgagatgctatcttaatcttgctagaagcccataatttaaaagtcagaaaacaatagatgttggcatagatgtggtcaaaagggagcactttgacactgctagtgggaatttaaactagtccgaccactatggtaaacagtatggggattccttaaagaactaaaagtagaccattcattccagcaatcccattactggctatctacccaaaggaaaagaagttattccataaaaaagacacaagaatatggatgtttatagcagccgattcgcaattgcagtgatatgggaccaacttaagtgcccatcaacgaacgagtggataaagcaaatgtggtacaccatggaataatacttgataataaaaaggaacaaaataatgtcctttgcaacaagttggatggaactggaagccattattctaagtgaagtaactgaggaatggcaaatcaaatattgaatgttttcacttttaaatgagagttaagctatgagaatgcaaaggcataagaatgatataatggacttggggactcagggggaaaggttgggagggggatgaggaataaatgatgacatattgggtatattatacactgctcaggagacagatgcctcaaaatctcagaaattaccactaaggaacttttatccacataaccaaaaaccacatatattccacacactattgaaagaaacataaacattattttaaaaaataaagccacttttaaaattagcaaaataaaataaatatgtcttcagagtttagatattggatccaaattagacagatcaaatactgcctttactaaatattttcatgtcattaacaacttctaaaacctttcaaacagttttttgacatgtcttggaaccatccatttctagctaaggcctgggcacctgtgaaatagggccatgcccccccttatactgggaagagtaagatatttcaagactaagatgttttctacagctccatctttttctttaagctctacatcaaggacataattaaaattggttgtctcctaagtggtttactaaaaatgcatacttaagagttaccattataattaatatttgtatctaaagctacttaaaaattttcacacacaaatctgactgaacaagtaaaatatattttaagtcaaagtttataaaaggacatgagaacatagcttttatgaaaaaattagttttgtcaagtttagaggttttcaaatattttaaattcaggaaataaaataacaaaaagacaaaagaaaatggttgaacaacttagaaaaggtttgttaaaattcatcttataaaacaatctacatgtaaaaagtgggctaaaatttgaaagagattatttaggttttccataaattaatccagaaggggtaggaagtcttaagaatgaggaaggacaggaggaaggggaggtcatcctgacactgcagaggcagaagtgcagctgaaggtatgaaggctaagaggggaggggagtttgagtgctgctgcctggctgtcagagcagaggagggtcctgggcaccagacttgaggaagggatgaaaatgctgggcagacctgtagtgggcccttgagatggcagatagtggtttccagagagagggccattgttttccagtgcccagcactgagcagagagagttttgggcagtgtaaaaaaaaaaagagaacttacctctttctcgttttagaaaaagaacagtctaagaatatcagcagggaaactctcagtgcttcaaggggttaaacgcccttttggctttcttgtgttggtttcatcatagaggaggagaaacttcttggaagtgttcctaaaaacacaacacgtctgcttctcctttcaaaaaaggaagtgctaaaacacgaacactctagatccaaatattaatacggatgtctaaatgcttccgttttccaaggggcagaaagctaaaggttgtaacctattcatttcagtcaaagttggtgaaagggaagcaaaggaactgggtggggcttggaaggatgacgaagctcaagctcattggccagcaacctctctcctgggggcgggaggggtgagcatacgtcattgctttggcttctataaaatgaggaggactcaccgagtgtgaagagtccttctggtgattgcagctgagagcacactcacgacgttctgcaaggattctctgattatgattctgaagggaaaagcgatggaatggacagcagagattgtaattttctttatcttgaattacggaagaaagtatctaggacagaaatccacgacaagtccttggaaccagcagatctcttcgttcacggagacgttgacgtattctctattgaagaagattcttaccttcttactggacaaggttttgtcagttctgcgtgactggattgtccgggagactctgaggaaactgatgtcacatgtttttccaaagaagatgtttctggaaccaacaactgtgattgtggtttgaggacttctgagagttccagtacaggaaataagcagaacatcagctggaggctaaacggatccagacttcactcttcacttcccttcctattcagtctattgtgcctgctgactgagaagcttggctggtatgtgagcaaataaacggaactattcagaaggagatgttgacatattctgtattgaagaagatccttatcttctcacctgacaaggttttgtcagttctgtgtgactggattgtccggaagactctgaggaaactgatgtcacatgtttttccaaagaagatgtttctggaaccaacaactgtgattgtggtttgaggacgcctgggagttccggtatgcgaaataagcagaacatcagctggcggctgaagggatgcagcctccactcttcacttcccttgccattccatctattgtgtctgcctgactgagaagcttggctggtatgtgaggaaataaacggaattataaacaaggagattgtttctcatctacttcattctgttgtggcttttctattttggggttcagggtgtgtgacaaggaccaaggagatgaaaggtttcatgatggagaaagcccaggcaatcagattgaagagctatccacagggaatcttggctgctgaggggctgcaccctgcaacggactgaccatatgacagaaaagggttttaaaggctcaacttctggactgagaacccagagtaatttgggaacctcctctgtgaggagatatgaaagctgggaatcatgacatccctaggaatggaaggcacatttcctgatggaaggggtgctttggaaaacaggagcagagtagacacagcagccttgtggatacgggtgggcagcatgcatgggtgatgtgaacgtggagtgtttgtgatcgaaactcaaaatgtctgacaaagtgaaaacctagaaaccacaatgaggaggaagagtttgtgagggcaatcactctccccatgtgtgaaaatcgggggctcttaaaatctcatctggagaggtgcagtctaccaaactctgggactttagcctccccttttaaaaaaccgtgcatcaataccaacgtccgaaaccacagaaataacacctggcttgcatggagacaaggacaaaaagccgtcatgatgagttgttctgctcacttgctgcctctgttcagtgcacaggatattgtccacccactagcaggctactgcaagagaagtgtgcaatatgttccctatgtgccatatatgtgccatatggcccatatgacaactgagtcagaaaatatctgatgccctcagagttacactccacctggagcttgcccccagccatccaggacctaggctccctaccctgtccaattttctggtgttttgggggcttcattctctaaggtgtgcccactctttactcaaaccaaaacacccacatattcctgcccatgaacaaccaatcaaccacttctcagttccacatcctgctgttgggtctctagtggtgacactgtaactcccaggtcatagtggtgacactataacacctagctaaattgatgccttgtctctaggaggccatgggctcctgcaggtctcatctgactctctgtagccttccctgacaatgctcacaatacccaagccagagccacattgacagcaagctgctctcatcttacctttgccagacctggccactggaaaaggctgaccctcatcctgcaatgcctatacctccaacctttgtctcaagctggtgtcctggagggacttctaagcagaaaacagattcagactcccatcctctcctgaatggcctcatatccaattctcagaccctcagccttcattgtaaggacacttcatccatgcccttgagtattctgtctgcactgtgtattctgcaatagattctcctccctctgcgaccctcaactccttccgcagactttttgttttcttgatcatctaccatagtcttccactgggacactgccaagcccattctggagagtgagttgtgcaagtacactgccccccatctacctttcgggaggtgtatacacccttctttctcccaggtctggaggctttctattttcatcctgaggcatctccacctgctcttggattcttcaaattgacaaccaccagttaacaagaactatgtgtcaccaaatagccaaacaatggcaattacaaaaataaaattaatagctgtaacccccattagcaaggatacacaaatcaaatcagggatagtgggtgaggaagtctgcctaacattcaaggaaggattctgaagtgatacaaaatcattgcctttgctatctttagaatggacactttcagccaggcacagttgctcagcctgtaatcccagcactctgagagccccagttgggtggatcacttgaggccagcagcttgagaccaccctgggcaatgtgcagaaaccccaactctactaaaaatacaaaaatagccagttattgtggcacatgcctgtaatcccaactccttgggaggctgaggcacaagaatcacttgaatctgggagccagagtttgtaatgagcgaagatcatgccactgcactctagcctaggcattagagtgataatctgtctgtggaaaataaaaacattcctcttcaaagttttcttctttaaatcataaatgttggaattaatatatcctctttgaaactcactttcttcaagcttctttatttgatggtagtaaatctttgttaagctttatgaggcaagagtaatggaagaagcatattatatatatttatactctaacctcagtgcttgttctagcaagctcaggcatgcgtgaatgtgcccaggcatgttccagcccataccttatatcctttccttattgggaaatgctgttactcctataagcattcttgtaagcaacttcctctttttctttgtctccactatctttacctattgaggacagttttaggttcttagccagttggatgtagcatagactgtgaggtccaaccccagccaatggagatagcacacagcagtagcgacctcatgcttaacagataaatattcctgtctccctttgtttggggtgctctcagctgatgagcaacaccctttctaaagaaattaaagttgtcttgctgagaaaacttttggtctaaatgctgattcttccttgcagcactgaagaagaagcaattatttccaacactttctcatacacaaaaaaagaagaaggtggaagaaaactttcttgtgcaccctatccctcactcagaaagacaacagaaggctcctagtggcaagccctagaggattcatttcttttgggaaccctcttggctgggatactaggactcaggtcaaactcagcattttcagtgtgtgggaagtgtgcttgggtttcactgttacttccaataatgtgatttggtccttggggttcaccaaattttggtatggagtggtgaaccctgttaagtttaagtgtctataaaattaacaaagcaaaataaccattctgccccatggttcagagaccaaatattgtgtaggaaatgctttagcgagagaaacagagaagaataaaaaatgtcctcaagcgctgcattatttcttgttatcgtccagatcttagaggaaaggctttcattttccctcattcagtatgatattagctgtgcatctgtcatttatggcttttattatgttggggtatgttccctgtgtatgtagttttttcagggtttttgttatgaagtgatgttgaactttatcaaacgtttttcagtttcagttgaaacgatcatatgctttttgtccttcattctcttgatatgatgcatcatgttgatgatttccatatggtgcactgtccttgcatcctgggcatgaattccacttgatcatgacaaatgaatttttaatgcattcttgaattccgtttgctggtattttgttgaggatttttgcatcaatattcatcagagatattggcctgcagtttctttttttttcttttttctttgttttgttgtttgtttgtttgtttgttttgatgtgtctatgtctggttttggtatctgggtagtagtgttccatccccttttattttttagaataatttgaataagactggtgttggttctttaaatatttggtagaattccgaagtgaagtcattgggccccgggcttttctttagtggaaggctgtttattatggcttcaatctcgttacttattattggtctattcatgttttgaatttgttccttatttaatcttggtaggctgtgtgtatctaggaatttgtccatttcttttagattttcaaatttattggcacataattgcccattgtagcctctaatcgtcatttgagttcctgcagtaccaattataatgtctccttcttcatttttgattgtatttatttggatcctgcccctttttttcttacttaggctgcctaataatttcttaattttgttgaactttttcttttgtttgtctcgctctgccaccaggctggagtgtagtggtgtgatcttggctcactggaacctccgtctcccaggttcaagcaattctcctgcctcaccctcccaaatagctgggactacaggcaagtgccaccactcccagctaatttttgtatttttagtagacacgggttttcaccatgttggccaggatggtctcgatctcttgacttcataatccacctgcctcagcctcccaaagtgctgggattacaggcatgagccactgcgcccagcctaattttgtttaaattttcaagaaatcaacttcttctttcattgatttctgtattttttatttccattttatttatttaaactctaagctttattctatcttcttctcattttagctttggtatgcttattgcctctctagctctttaatgtgcattgttagattgtttatttgaagttcttcctctctacaccataagacgtaagcatgtcctcattatgtcataagatgtaaccacttacagctataaacttccttcttagttctgcttttgctgtatctcataggctttgttatgttgtgtttccattatcaattgtgtcagaaatttttcaatatttttcttaatttcttcattgagcaactgatcatttgggagcatatttttaaacttccatgtacttacatagtttccaaaatacctcttgtgatcaatttctagttttattccactatggttcaagaagatgcttgatattatttcaattttttttcacattttaagatgtgttttgtgacctaacatatggtctactttttttttttattaaactttaagttgtggggtacatgtgtagaccgtgcagttttgttacataggtatacacgtgccatggtggtttgctgctcccattaacctgtcatctacattaggtacttctcataatgctatccctcccctaacctccaccctctgacaggacctggtgtgtgatgttcccctccctgtgtccatgtgatctatttttgagaatgatccatgtggattagaatgctgtggaaaagactttggattcctaatatccagggagggagacgatgatattactttcaatatcacacgggtgtacacactctctgtgacattgttcctaatatccagtggaagagaggatgatataacacccagggagggagaggatgatattactcttaatattgcagggtgtgtacccatgcctatgatattgttcctaatatcaggagggggagaggatgatattactcagaatatggcagggggtgtacacacactctgtgacatggttcttaatatacaggggagaatgggacaatattactctcaatatcgcagggggcgtacaaccctgtgatttgttcctaatatacaaaaggggacagtatgatattgttcctaaaatcgcagaaggtgtacaacgccctgtgatattgttcctaatatccagggcgggagaggatgatattacccccaatatcacagggggtgtgcactttccctgttacattgttcctatgatccgagtggggggaaatgacattagtcccaatatcgcaggatgtgtacactactcccccatgatattgttcctaatatcaagggggagagaggaggatattactcccaatatcgcaagggaggtacatcctccatgcaatattgttcgtaatattcaggaggagagaggaagatattactctcaatatcgcagaaagtggacacccaccctgtgatgttcttcataatatccagggaagcagacgattatatgactttcaatatcgctgggagtgtacatcccttttgggatattgtttctaatatccaggaagggagaggattatattacttccagtattgcagccagtgtacacatttcttgtgatattgttcctaatatccagaaagggaaaggatgatattactcccaatattgcaggtggtgtacacccccctctgatattgttccttacatcaaggaaaagaaagaagaatattactcccaatatcgaagagagtgtacacccctcctgtgatattgtatttaatatccatggggaaagaggatgttgttactcccaatatcgcagggggtttacacccacactgtgatattgttcctaaaatccagtgaaggagaaaataatattgctcccaatattgcagggtgtatacaggccctcccccgttatattgctcctaatatccagcggtggagaggatattactttcaatttttgcagggagtgtgtaccccctctctgatatttttctaatatcaaggatgggaaaggatgccattactcccaatatcgcaggaggtgtacatgccctgtgatattgttcctaatatccagggaggtagaggatgatattactttcaatattgcaggggctgtacaccctctatgatgttgttattaatatttaggttgggagaaaatgatatttttcctaatatcctgggaaggaaaggatgatattactgtaaatattccagggagtgtacaccttcctaatattctaatattgttcctaatatccaggggtgggagaggattatattactcccaatatcgcagtgggtgtacacccctcctgtgatgttgtttctaatatccaagcgaggagaaaatgatatcactctcaataccgcagggggtgtacaccttccccatcatatcgttcctaatattcagagggaaagaagatgatgttactttcaatatcgcaggggttgtacacaacccctgtgatatttctcctaatatccaggaagaaagaggatgatattgctcccattatagcagacggtatacgcctccctgtaacattgtttctaatatcaagactgggagaggatgatatcacttccagtatcgcaaggggtgtacacctcccccgtgatattgttactaatatccagggggaagaggataatattactttcaatattgcaggggctgtacacccccgtgatattgttgttaatatttaggttgggagaaaatgatattagtccaaatatcgcagagagtgtacacacttccgataatattgttcttaatatccatgggggagacgatgatattacacccaatatcgcagggggtgtagtctccccttgtgatattgtccctaatattcagggaagtaaacgatgatgttagtgtgaatattccagggagtgtacaccccctttgtgatattgtcctaatatccgcaggagagaagataatattactcccaatatcgcagggggtgaacacaccccctgtgatattgtttctaatatccaagcgaggagaaaataatattactcccaatgtctcaggggatatacaccttccctatgatattgtttctaatattcaggtggaaaacgggtgatattactcctaatatccaggaagaaaggggattatgttactccccttatagcagggggtatacacctcccctgtaatattgttcctaatatcaaggctgggatatacgtggggggaaggatgatattactcccaatatcacaggggttataaaaccttctgtgatattgctcctaataaccatggcggaagaagatgatattactcctaatattgcaggaggtgtacactcccccattatgttgttcctagtatgcagaaaaggagaggatgacattattgccaatatcgcagggtgtgtacaccacccatgatattgttcctaatatttagagggacagaggatgatattactcccaatatcgcagggggtgtacacgcatcccctgtgatattgttcttgaaatcgaggggaaagagaattatatttctctaaatattgcagagggtgtacaccgccccctgtgatattgttcctaatagccgggggcggggggagataattaaattactttcaatatctcagagagtgtacatcccccttgtgacattgttcctaatatccagagcaaaagagaatgatattcctcccagtatcgcaggaagtgtacatttaacctgtaatattgtttctaatatccagggggaagagaatagtaatactcccaatatcgtaggggttgtacaccttttctgtgatattgttgcaaatatttagaagagagagagaatattactcgcaatatcacagggaatgtatacttcccctgtgatattgttctaatatctagaaaaagagaggataatattactcctaatattgcagggggtgtacacccccacttgtgatattgttcctaatataaaggaaggtcgaaaaacaaacggggagcccagggggaaggaaggcaggcgaggaagaggcagcgccggggcgccggagggagcagccgggccgcggaagcgcgagcacgagaccggtcgcggtcgcagtcgcatttttgccgttgtcgcggccgccgccgccgaggcttacccggggatgtctgagcccgcgcctcgcggcccccaagctccacgctgcgcccgctgtcccggcctctaagggccgccacgtccctgcggcgcgcgcaggcagaaagcggcttcgtgccggcggagggggcccgggcgggccgggaaaggctgccccaggccccgcgcctaccccatcaccgcggccggcgccgggccgggaggatgagcggtgtggggctctgaagcatggagggggttttgtacaagtggaccaactatctcacaggttggcagcctcgttggtttgttttagataatggaatcttatcctattatgattcacaagatgatgtttgcaaagggagcaaaggaagcataaagatggcagtttgtgaaattaaaggtgacagctttggaggggaccacccttgattggatacataaattctgttcattcagcagacaacacaagaatggaattaatcattcctggagagcagcatttctacatgaaggcagtgaacgcagctgaaagacagaggtggctggtcgctctggggagctccaaagcatgtttgactgatacaaggactaaaaacgaaaaagaaagaagtgaaaccagtgaatcgctgaaaaccaaaatgtctgaacttcgcctctactgtgacctcttaatgcagcaagttcatacgatacaggaatttgttcaccacgatgagaatcattcatctcctagtgcagagaacatcaatgaagcctcttctctgcttagtgccacgtgtaacacgttcatcacaacgcttgaggaatgtgtgaagatagccaatgccaggtttaaacctgagatgtttcaacggcaccatccggatcccttagtttctcctgtgtcaccttctcctgttcaaatgaggaagcgttctgtcagccaccctggttcttgcaccagggaggagtagccactgtataaaagaaccagtatctgcacttcaccgactctcccagcgacgccgaagaacctactcagatacagattcttgtagtgatattcctcttgaagacccagatagacctgttcactgttcaaaaaatacacttaatggagatttggcatcagcaaccattcctgaagaaagcagacttatggccaaaaaacaatctgaatcagaagatactcttccatccttctcttcctgaagaaactgtagtgtccaactttctctaagtattgctatgcaaaagctgctgtaattgaactattgttatagggagtagttttttcccttaggactctgcactttatagaatattgtaaaacagacaaacaagaaaacaaaccacatacttttgaagcgtgttttatctttatatagtttgtttgcaagagtattttcctaataacttcacagtatgaatgtgcatcttttttttctttttttaacaaatgatggtgtaacattttgacatccataaggacaaatgtagatatttttctaaaaaaccgtgaggggactgacagcttggtcagggtgtattgtagcttataaacatgaaatcttacaaggtttcagtttgacagaagtgtgatatatgtaacttgtgccatggaccaaatggtcactttaccacagctaaaaatgagttatgatagcagcttgatggtgattgcattgtattcctttaatcaaaaaggaaacgcaatattctaagtatctttagcccaaataccatgacatattgagcatctttaaataaccagactgtattgtccttcatatgtgaagttgacactactgatttgtcaataccaaattttgggttaaagtgtttaatttttatttatttattttcttgttgcctcaaaagatgattgcattctaacttttgtgacctaccaaatttaagatgtgtatacattgttctttacgttgttctagaaaagagattttaatgctgtagtgacttagctcacttacatcagagaaataaacaactttcaatggaaaaaaatatatataaaggaaggaagaggatgatattacttctcatatagaaggggttgtacaccccccttgtgatattgttcctaatattcagggagggagaggattatattactcccaatatagcagggagtgtacacccccccccccgtgataatgttcctaatattcagggaagcagaggatgatattactttcaatatcacagggggtgtgctgtccccctgttatattgttcttaatattcaggggggagaggatattattatgcccgatatcacaggagaagtacaccccacaagtgatattgttcctaatatccaggggtaaagaggatgatatcgcaggtggtgtacacccctccccgtgatattgtttctaatataaagaaggagagagcatgatattactcccaatatcgctggaggtctacaccccccttgtgatactgttcctaatatccaggaagggaaacaatgatattgctgtgaatattccagggggtgtacacccctttgtaatattgttcctcatatccagggggtagagaggatgatattactcccaatatcgcagggggtgcacggccccactgtgatattgtttttcatatccaggaggggagaggatgacattactctcaatatggcagggggcgaacaccccctgtgatattgtgctagttaggttgggagaaaatgatattactcccaatatcgcagggggtgtacaccgctcctgtgatattgttcctaatatccatgacgggagaggatattactcccaatatcgcagggggtgtacctctcccctgtgggattgttcacagtatccaaaagggaagaggatgatgttactcccaatatcacagggagtgtacaccaccattgtgatattgttcctaatagccagggaagaaaacgatgatattattgtgaatattacagggggtgtacacaccccctgtgatatggtttttaatatacaggttggaaaaggatgatattactcccaatatcacaaaaggtgtacacacccccccatgatattgttcttaatacttcggtggggagaaaatgatattagtctccatatcacaggggtgtgaactcctccggtgatattgtttttaatatcaagaggggaggagatgatattgctttcaatatcgctgggggtgtacatccctcctgtgatattgttccttatatccaggcgaggggaaaataatattactcccaatagtacacaccccatgtggtattgttcctaatactcagggggaaagaagataatattactttcaatatcacagggtttgtacacctttcctgtggtatagttttcaatatccagggggaaggtacatgatattactcccattgcagcaaggggtgtacacacctcctgtgatattgttcctaatatccagaagtggtgaggatgatattactcccagggggtgtacaccccacctatgatattgtttctaatatccaggggaaaagagtgtgatattatgcccaatatcgcagagggtgtacacttatcctgggatattgtttctagtatttggggagggaggagaggatgctattattctcaatatcgcagaaattgtacacccccgctgtgatattcttcataataatcagggaaaaagaggatgatattactaccaatattgcagggggttacacttcccctttggtagtgttcctaatatccaggaagaaagaggatgatattaatcccattttccaggaagtgtacacccaccgtgtcatgttgttcctaatatccagcagggaagaggatgatattactcccaatatcggagagggtgtacacttcccctgttatattgtttctaatacccagggggaagaaggatgacattactgccaatatcacagggtgtgtaccccaccctgctattgttcctaatattcaaaaggaaagatgaaaatattactcccaatatctcagggtgtgtacacctctcctgtgatatcgttcctaatatccacaggaagagagaatattactctcaatattgcaggggggtgtacacccccctgtgatattgttccaaatattcgggcggggagaggatgatattagtcccaatatcgcagggggtgtgcaccaacctgtgatattgttcctaatatccatgcgggggaggacgatatcactctcaatgtcgcaggaagtgtacacctctcttgttatatttttcttaatatccaggagggaaaagatgatattactgccaatatcgcagggtgtgtccaccccccttttatattgttcctaatatccaatggaaaagaggatgacattgctctccatatcccagaaggtgtacaacgcccctgtaatattgttcctaatattttgggggaagagaggatgatataacttataatatcacaggaggtgtacaccacccctatgtattgttcctaatatcctttaagggagaggatgatattactcccaatatctcaggtggtgcctattccccctgtgatattgtttttaatatccaggggaagagagtatgatattacgcccaatatcgcagggggcatacaccctctctgagatattgttcataatatatagagggagagaggatgatattacttccaatatcagaggtggggtacaccccccggttatattattcttgatatccaggaggggagaggttgatattactggatatatagcagggagtgttcacatcttctgtgatactgttcctaatatccagaaaagtagaggatgatattactcccaatatcgcagaacgtgtacacctccctgtgatattgatcctaacattcaaaggggagaggatgatattactcaaaacatcacagggcatgtacactcccctgtgatattgttcctagtatccagaagggagcaagataatattactttcaatatcgcagggggtgtacacccctctttggtatgtttcctaatatccagaaggaaagagggtgctattactttccatattgcaaggggtgtacacccccctgtggtatggttcataatatccagggagggaaagggtgctattattccccatatcgcgaggcatgtacaccctgctgcggtacggttcctaatatccagggggaaagaggatgctattacttcccatatcgcggggtgtgtacacccccgtgtggtatgttttgtaatctccgggaacgaagagggtgttattacccctcatatcgctggaaatgtacactcccctgtggtacggttcacaatatccaggggattgagggtgctattactccccatatcgcggggggagtgcacctccctgtggtatggttcgaaatatccagggtaagagagggtgctattattccccattttgcaggaggcgtacacccctctatggtatgttttgtaatatcccaggtaaggggtgctattgagagaagagagcaaaagaccccccccatattgttctgtattattttatactcagtacctgttttaagaagaaacaaggaagcgaaaccaaaggcaggcagcccggcgccaggcaccagatccaaaaccagacccgaaaccaggcctgggccttcctgaccttagcctgaaagttaaaattcaacccatgacctagcaactgatgttatccatagattccagacattgtatggaaggacattgtgaaatttcttgttctgttctgtttcactctgagtactggtgcatgcagcccttgtcacatacccactagattgctcaatcaatcatggccctttcatgtaaaaaccttagtgttgtgagcccttaaaaaggacagaaattgtgcactcaacaagcttggattttgatactctagtctgctgatgcttccagctgattaaaagccacttccttcactacctcggtgtctgtgggattttgtccgcggctcctcctgctacactgtgactccccttatagagaggggtgtacacccccctttggttcctaatatccagcgggggagtaggtgctattactccccatattgcggggagtgtacacccccttgtagtacggatcgtaaaatcaaggagggagagaaggtgtaattatccccatatcacagggagtgtacacccctttgtggtatagtttgtaatatccacgacgggagagaatgctattactccccatatcgtggagggtgtacaccgccctgtagtatggttcgtaatatccggaaggggagaggttgctattactccccatatggtgggaagtgtacacccccatgtgatatggttcataatatccaggggggtagaggatgatattacccacaatatcatagaaggtgcacacccttttgtgatattgtccataaaatccagaaggggagaggatgatattacttccaatatcacagggggtgtgtagccccatatgatattgtttgtaatatcaaggtagggagaggatgctattccttacaatagctcaaggggtgtaaccttcttgtgatattgtttgtaatatccagaaggggagaagataatttttttattttaaaagtaaactttaatgtcaaaaatgcaaacttgagaagggcagaaagatcaaacagaaggctgccacttcacaattggagggttgcacagtggccgggcagaggcgctcctcactccccagacggtgaggcagccgggcagaggtgctcctcacttccgagatgttgcaggagccgggcagaggtgctcctcacttcccagaacagggggctgccgggcagaggtgctcctcactgcccagacggtttgcaggcctggcagaggcactcctcacttcccaaacggagcagcggcaagccagaggcgctccacacttcccagatggtggggcagccgggcagaggcgatcctcacttctcagagggtagggcggcccagcagaggcgctcctcacttcccacatggtggggcggcaggctagaggcgatcctcacttcccagacggtggtgtggccatgcagaggtgctcctcacttcccagatggtgtggccgccgagctgaggcactcctcacttccctgacagtggggcggctgggcagaggcgctcctcacttcccagacacttggactccgggcagagactctcctcatttcccagatggtggggctgccgggcagaggcgctcctcacttcccagacggttcagaggccgggcagaggcgctctggggagaggataatgttactcccaatatcgcagggggtgcacactccctgtgatattgttccgaatatccagagggggaaaggatgatatagctcccaaaatcgtggggagtgtacacccccctgtgatcttgtttgtaataccaagaagaaaagagaatgctattatttccaatatagcagggggagtacaaccccctgtgatattgttcgtaatatctagggggagagaaaattatattagtcttaatatctcaggggacgttcatccccctgtaatattgttggtaatattcagaatggagaagatgatattgttcttaaaatacaggaaaaaatatgataatattacttccaatatcgaagggggtgtacactctcctgtgatattgttcccaatatccagaatgaaagaggatgctattactcccaatatcccagggagtgtacacccctttgccatattgttcataatatccaggggaagacaggataacattactcccaatatcaccgggggtgtccacccactagtgatatttattgttcatcatatccagaaaaggagaggatgatattactcccaatattgcaggtggtgtacggtccctgtgatattctttgaaatatctagaaaaggagaggatgatatcactccgagtatcacagggggtgtacacccccctgtgatattgttcgtaatatccaggggagaaaaggatgatataattgccaatatttcaggggatgtgcacctccctgtgatattgtttgtaatatccaggggtggagaggatgatattactcaaaataacgtaaacatcctgtgtgtacatcccctgtgatattgtttataatatccaggggggtagaagatgacattacccccaatatcacagagtgtacacacccctgggatactgttcataatatccaggcgggaaagaatgaactacttccaatatcgcaggatatgtacacccccctgtgatatatttcctaatatttatgtgggtaaggatattacccccaatatcacagaaggtgtacatcctctttgtgatattattcctaacatccaggaaaggagagaatgatattactcccagtatcgcagggggtgtacaccacccctgtgatattgttgctaatatccagggggagaggataatattactcccaaaatcacaggggacgtacactcctcctgagatattgttcctaatattcatggggaaaagaatgctactactccaaatacagcagagggtgtacaccatccccgtgatattgttttttatatccaaagggtgaaaggctgatattactcccaatatcgcagggggtgtacaggccccccatgatatcattcttaatatccagggaggcaaagaatgatgttactcccaatattgcaggctgtatacaccccccgtgatattgttcctaatatccagagtaagagaggatgacattgctcccaatattgcaggggttgcacgcacgccctgtgataatattactcccaatatcaacagtgggtgtacactcctcctgtgatattgtttgttatatctaagaaagaagaggatgatattactgtcaatatcacagaaggtgtacagccccttgtgatgttgtttctaatatccagcggtgagaggatggtattactcgcaatattgtagggggtgtccaacggccctgtgatattgtttctcatattcaaaaaggaaaagaataatataactccaaatatcgcagggtgtgtacacttccctgtgatattgatcctaatatccaggaagagagaggatgatattaatcccaatatcacagggggtgtacatcgcttctgtgatattcttcctaatatccagggggggaggggatgctattactcttaaaatcgcagggaacttacactcccactatgatatttttcctaatatccaggaagggagaaaatgatattactcctaatatcacatatcacaatgggtgtacatctccccgtgatattgtttctaatatcaaggatgggagaaaattatattactctcaatatcgcagggggtgtgcacacctcctgtgatattgttcctagtatccagcggaggagatgatattactttaaatattgtagaaggtgtacaacccccctttgatattgttcctaatatccagggggaaaggagatgatattactcctaatatcgcaggggctgtacaaccctatgtgatattgtttcttctaatatccaggggtggagaagataatattactcctaaaatcgaaggggacatacactccccctgtgatatttttcctaatatccagaaggaaagaggatgatattactcctaatattacaagaaatgtatacctgtcctgtgatattgttcctaatatccagaggggtaaatgattatattactcccaatatcgcaggggtgtacaccttccctgagatattgtttctaatatgcagtggaggagaggatggtattactcccaacatcacaggagatgtaaactccccttgtgatattcttcctaatgttcaggacgaaggagggtaatattactcactgtattgcagcagggggtgtagagccccctgtgatattgtttttaatattcaaggttggagaaaataatattccttccaatatcgcatggggtgtacacccttctttttatatagtttctaatatctggggggagaggatgatattactcccaatatcgcagggggattacacccccactgtgatattgtttttaatatccagggtgggagaggataatattactccaaatatcccagggctatacaccctccgtgtgatattgtttctaatatccagaggaagagaagatgatattactcccaatgtcacagggtgtgtacaggccttctttgatattgttcttaatatccatgagggagaggatgatattactcccaatatcgcaaagactgtacaccctttctgtgatattgcttccaatatccagggagggagaggatattacactcaggatcacagggggtgtacaccccaacctgtgatattgtttctaatatctagggaaaatgagggtgatattactatcaatatcacaggaggtgtacactcccttatgatattgttcctaatatccaggagaatgacaggataatattactcccaatatcgcgggtggtgtctccccccactccgtgatattgttcctaatacccagagggggagagaatcatattactcccaatatcgcaggggatgtacacctacatccggcggagtagaagataatattactcacaatatcgcaagaagtgttcaccttccctgttatattgttgctaatatccagggagtgagaagatgatattactttcaatactgagcgtgtacactacccctgtgatattgtttctcatatccagtagaggagaaaatcatgttactcccaatattgcaggggtgaacacctcctttgtgatatttttcctaatatcaggaaagggagagtatgatattacccttaatattgacaggggtgtacacccccctttgatattgttccaatatccaggggggcagaggataatattattcccaatatcgcagagggtgtacaccccccgtgatattgttcctaatatccagagaaataaaaaatagtattatttccaatatcacagggcgtacattttccctgtaattttgttcctaatatctggggggtggggtggcaggataatattactctcaatattggagagggtgtacacccccctgtgatattgttcctaatattcagggtgggagagaatgatgttactcccaatatctcaggagtcgtatacacccccttgtgatattttttctaatatccaggaggcagaggatgatattgctcccaatatcgcagggggtatacacccgagctgtgatattgtttctaatatgcaatatgggggaaggatgattttactttcaatatcgcagggaatgtacactttccttgtgattttgttcctaatatccaggggtggagaagatgctattactatattactcctcatatcgcaggcggtgtacaactccctgtgatatggttcagaatatccagagtgaaaaaggagggtgacattactcccaatatcgggggggtgtacacccctttgtgatgtggttggtaatatccaggggggcagatgagggtgatatcactccccatatcgtggaaggcgtccacttttttgtgatgtggttctttatatcccgaggggagaaggtgatattactccccatatcgcgaagggcatacacccccctgtgatatagctcataatattccggagagtggaggaagatactatgccctatatcgcgggtggcctacaaccccctatggtttggcttataatatccaggggggagagggtaatattgctccccatattgtggagacgtacagccccctgtgatatggtttgtaatatctttggggggcgagggtgatattactccccatatcgcggggagcatacacccccgtgatctggttcatagtatctcaaaggaagaagttgatgtgtacaacttaagggaaaaagttgaagtgaagtgtacacacgccctgtgacgtggttcataatatccaggcgggggagaggagagtgatatttactccccatatcgcgggtgttgtaaactcccctgtgatatagttcataatatccaggggagagaggagggtgatattgctcctcatatcgcgaagggtgtacaaccccctgtgatatggttcataatatccagaagggtagaggacgatgatattactccacatatcttgggaggtgtgatatggttcgtaatatccagcgatgagagaatgatattactccccatatcgcaaaaggtgtgatagggtttgtaatatcctgagggggagagggtgatattaatccctatattgcagaaggactacaccctcccatgacatggtttgtaatatcccagggggtagagtgtgatattactttccatatcacagggggtgtgatatgattcgtaatattcgaagggggagagggtgacactactctccatatcacggggtgtgtgatatggttcttaatatcccaggggttagaggttgatattaccccctttttggggggtgtgtacaccccctgtgatatggttcgtaatatcccgggggagacagggtgacattattccccatatcgaggggatcgtacaccccctgtggtgtggttcataatatccctagggggagatggtgatattactccccatatcagggggcgtgcactcttctgtggtataattagtaatatccagggggcagaggtcgatattcgtttccatatcatgaagggagtacacttccctgtgatatggttcctaatatccaggggggagagggtgatattattccccatattgcggggggacatacaacccctgtgatatggttcataataaccagaaaagaagagggtgatattaatccccgtattgcagagggcatacaccccccctgtgatatggtttgtaatatctaggggaggaaaaggtgatattactttccatattgctgggtgcagacacccctttatgatatggttcataatatccaagttggagagggtgatattacttcccatatcatgggaggtatacccttccctgtgatatggttcgtaatatccagaaggggagagattgatattactccccatattgtggggggcgtacaccttcctgtgatacggtttgtaatatctaggggatatagtgggtgatattactcaccatatcacgggggttgtaacatggtttgtaatatccaggggaggagagggtaatgttactccccatatctcggggcatgtacaccctcctgtgacatggttcgtaatatccaggtcgggagagggtgatattactcctcatattgccgggggtgtgttatggttcataatatcctggggaaggaggctgctatcactctccacatcttgggggatgtacactctcctgtgatatggttcataatatccagggtgggtgagggtaatattactccccatatcgcgggaagtgtacatacccctgtaatattgtttgtaatagaagagagggtgatattactccccacatcgcgggtggtgcccacccccctgtgatatggtttggaatatccagggggatgaggagggtgatattactccccatatctcggtgggagtacatccctctttgatcaagttcataatatccaaaaggaaacaggagagtgatattactccccatatcgccgggggtgtacacgggagggggagtacacccccggcgatatggtctgtaatatccagggaaggagaggagggtgatattactcaccatatcgcaggtggtctacatttacctgtgaaacagtttgtaatatccagggggggaaatgagaatgattttttttttttgagtctcactgtgtcacccaggttggagtgcagtggcacgatcttggctcactgcaacccccgcctcctggactcaagcaattctcctctcccagcctcctgaatagctgggactacaggcgcaccccacaacgtctggctaatttttgtatttttattagagacggggtttcaccatattggccaggctgatctcgaactcctgaccctgtgatccatccgcctcggcctccaaaagtgctgagattacagatgtgagccaccacgcatggcccaaggagaacgatattactccccatatcccagggggtgtatatccccctgtgatatggttcagaatatccggaaggaaagacagggatattacttcccatatcgcaaggggtgtgacatggttcgtaatatcccatgggggagagggtaatattactcttcgtattgtgaagggcatacactcccctgtgatacagttcataatattccggggagtagaggaagatattatgctccatatcgcgggtggcataagccccctgtggtttggttcataatatccagggaggagagggtaatattactccccatattgtggggacgtacaccctcctgtgatatggtttgtaatatcccagaggggagagagtgatattactccccatattgcagggacatacacccccctgtgatatggttcaaaatgtcttttttttttgaaggactggttctttatttcaaaaagacacttgtcaatattcattatcaaaacagttgcactattgatttctctttctcccaatcggccccaagtagaccacatcaaaggagagtacatattaagccaataagctgtaggatgtacacctaacagacctcctagaaaccttaccagaaaatggggacagggtagggaaagaaactttaaaagatcaacaaactgccagcccacggactgcaggggctgtcacagccagatggggtggccagggtgccacaaacccaaagaagcaaagtttcaaaataatataaaatttaaaaagttttgtacataagctattcaagatttctccagcactgactgatacaaagcacaatgagatggcacttgtagagacagcagcttcaaactcagaaaagggtaatgagatgagtttcacatggctaaatcagtggcaaaaacacaatcttctttctttctttctttctttcaaggaggcaagaaaagcaattaagtgctcacctcaacataaggggaacatgatccattctgtaagcagttgggagggggtagagatggaacaaaattttggtctcagaggtcttgccatcttaatttggtcacttctaatgaaaaaaataaaaaatagaaataacattatccaaaggtatcttaaagctgaaaacttgaacagcacattttttgttgttgttgtttggctaactcctcctggaaccacctttctggcttagctagtactttgtacagagcaatgaggcttcccatagtggagtctccctgggctctgtttggctctcagcaaggcaggcctataccttttcctctcctccatggagagaggaatatgcattaaggtgaaaaatcaccttccaaaagtgagaaagggattcgatcgctgcttcagggctgtggtattatatggaatgttttacaaaaggttgctacaaaacaacaaaagaggtaattacaaaatgtgtacatcacaacatactttttaaagacattatgcattgtgctcacattcccttaaatgttgtttccaaaggtgctcagcctctagcccagctggaatctccgggaagaggcggacagtttggtgaaaaagacacagggaaggagcgggcggcggaaggagggggcggcgaaaggagaaagcagccttccagttaaagatcagccctcaattaaaggtcagcttcgggcaggctggcctcaggcggagtctggttcagagggaggagcagcagcagggtgagactgaggcgttctacatctcattcaggtcaagcagagtctggtccagcatcctttgtgtacagaggtgctcccctttggtgcatttcagtttatcttccaagtcatcaattgtcttttccagcttggctaccgatctctcagcaaactcagcatgggtctccgcctcctttattttatcagtaagaatcttgatctcttcctcatatttgtcttctttttgagagtacttttcttcagcagcactcagacacttcaggttctggtccatcagtctaatctgctcatccatctctcggcaaagggattctgccagctcagctcgttcctctgtgcgttccaagtctccttcaatgatcaccaacttacgagccacctcttcatacttcctatctgcctcttctgcaatgtgcttagcttctctgagttggatttcctggagttccatcttttcttcatcttttaaggcccggttttcaataaccttcttacctctctcactctcatcagcagctttttccgcttcttccagcttttgcagggcagtagccaggtgctcctgagcacggtccagctcctcttcaaccagctggatcccacgttcaaggaggccacctcagcctcagcctgttcccgggcccacctttctccctcaacttctcgctggaggcgctcagctcgctcctctgcatcatctgcctgctgctgcagaacctggatcttgcgcttcaccgcctcgatggtggtgatcccagccatggtgcccacccagctactgctagagctccggttcctgcctcctccgatcggcgttgcagcctcctctcacccttacttccgcctcggttcaaaatatcttaagggaaggagttgatattactccccacatcacgggaagtttacatcccctggtgatatggtttgtaatatcccagggtggatagggtgatattactctccatatcgcgaaggagtactcccccctgtgatatggttcataatatccttggggggagagtgtgatattactccccatatcgcgagggccatatactcctttgtgacatggttcgaaatatcccggtgggggagggggtagagggtaatattactccccatacagcgaagagcatacgcccttctgtggcaaggttagtaatacttcagggaaaagagtgcaatattacttttcatattgcagggaacatacactcccctgtgacatggttcgtaatatcccgggggctgagagggtgatatttctccccatatcaccgggggcctacacctgggtgtgatatggctcataatatacagggagggagagggtgatattactccacataccgagtgaggggttacacaccctcgtgacatgttcgaaataccccaaggaggagacaatgatattactttccctgtcgcgggggctacaccctcccagtgatatggttcacaatatcccggggtggagagggtgatattactccctatatcaccggggggtgtacacttccctgggaaatggtttacagtatccccggggggagagggtactattactccccatatcacgttacatatcagggtacacccccacgtgatatggtttgtaacatcccaggaggaagaaaatgatattactccccatatcgcggtggcatacacccctccccgttaaatggttcataatatcttggggtggagagggtgatattactccccatatcacgtggggcatacaccccactatgatatggttcataatatcccggaggggagagggagatattactctccatgtcgcggggggcatatacacccctgtgatatggtttgtgatatcccgggggcggagagggagatattactctccatatcgtggggtcgtacacttttctgtgatatgattcgtaatatccagacggggagagggtgatattacttcccatattgcgggggcgtacacccctctgtgatatggttcataatatcccgaagaaaagagggtgatattactcctcatatcgcggggaacacacaccaccctgtgatatggtttgtaatattcagcgggggagagagtaatattactccctgtatctcggatggcgtacactcccctgtgatatggttcataatatccagaagaaaagagggtgatattactccccatattccagggaatgtacaccaccctttgaatatggttcgtaatatccaggaggggagagggtaatattgctcccaatatcgaaggaggtgttatacggttagtaatatccagagaaggagagggtgacattactccccacatcgtggtgggtgtgcacccacctgtgatatggttcataatattcaggttaagagaggtgatattgctttccatatcgccaagggtgtacactcccgtgaaatacagttcgtaatatccaaaaggggagagggtgatattactcccatatcgtggggggtgtacacccctctgtgatatggttcataatatccagggtggaataaggtggtattactccctgtatctcggggcatgtacatcgcctgtgatatgattcataatatccagaagaagagagggtgatattaatctccatattgctgggggtgtacaaccccctgttgtatggtttgttacactgagttggggagagggttacattactctcaatatcgagtggggcatacacacttatgtgatatggttcataatatcccagggaggagagggtgatattactccccatatcgcgggaggcatacaccccaatgtgatatggtttgtaatatctacatttttttttttgagacgaagtctcgctcttgtcccccaggctggagtatgatggccggatctcggctcactgcaacctcagcctcccgggttcaagcgattctcctgccttggtcccccaagaagttgggattacaggcgcacaccaccacgcccggctactttttgtatttttagtagagaaggggtttcaccatgttggccaggctggtctagaactcctgacctcagatgatccacctgcctcggcctcccaaagtgctgggattacaggcgtgagccactgcacctggcctggtttgtaatatctatgaagggggaaggtgatattactttccatatcacgggaggcgtacaccacgatgtgatatggtttgtaatatccagggggtatactgggtgatattactccccatatcgcggggagtgtatacccttttgtgatatggttcctaatattaagctgaggagaaggtaatattactccccatatcgcaggggtttttatatggttcataatattcaggaagagagagggtgacattactctccatatcacggggtgtgtactcccccatgtgatatggtttgtaatatccagggaaggagaggttaatattactccccatatcgcagggggtgtacacctctctgtggtttgtaatatccaaagggaagaggatgatattatcttcaatatcttggggggatacagtccccagtgatattgttcataatatccagagggggaggggatgatattactcccaatattgcaggtggtgtacaaccccctgtgatattctttataatatagagggggatgatgatattactcccaatatagtaaacaacctgtgtgtacaccccctgtgatattgtttataatatccaagggtggaaaggatgatattactcctcatatcgcagggggtgtatacccctctgtgacattgttcctaatattcaggggaggagaagatgatactactcctcatatcacaggggatgtacacccccctgtgatacttttggtaatatccaggggaggagaaaattatattattccccatgtcacagagggtgtacaccccgctgtgatagtgttcataatatccaggtgaaaagaggatgatattactccgaatatctcaggaagtgtacacccttctgtgatattgttcataatatccaaaggtggagaggaggatactactccccatatcgcagtgggtgtacacccccctgtgatatggttcataatatccaatgtaggagaggatgatattactttccatatcgcggagagtgtacatccccctgttatattgtttgtaatattcagggagaaagaggatactactactccccatatcacacggggtgtatattcccctgtgatatggttcctgatatccaagagatattataatcctctcttggattatgctacctctcatatcgcatggggtgtacacacactttgtgatatcgtttgtcatatccaaggagggagaggattatattaatcccaagatcacggggggtgtacaccctcctgtgatattgtttgtaatattaaggggggagaggataatattactcccaatataattaacaccctgtgtgtactcctccttgtaatattgttcataatatccaatgggggagacgatgatattactttcaatatcgcagaggatgtacatccctttgtaacaatgtttgtaatataaaaggcaagagaggatgatactacttccaaaattgcaggacatgtacaccccccggtgatattgttcctaatatccagtggggaagaggatgatagtagtcccaatatcgcaaagggtgtacacaccccctgggatattgttcctaatataaaaggaggagaggatgctattattcccaatatcacagaaggtgtaaaatcccctgtgatattgttcgtaatattcaggaggggagaggattatattactcccaatatcacagggtgtgtacacagggaggggcaagggccagaagcgggcgggaatccccatgtttgggcggacccagtttctaatggccagcatttgccaatcaaagcttaccagagaactctaaaagccagggctttcctgctagacaagactcatttctggaactgctttaaaaagaaacaaaacttcccaaggaccccttttcctctctgtctgcctaaaataatgttttaaaaactcctaaagcagctgaattcagcccccttcctgggggaatgtatagacggaactcccacctttcccggcatcccaaggccagagtatgtgaaactcctgggtctctatgtgtgtctgagcggctgctctgccaacactccacacagccctgtgtcctggacccaaggcccttatgacctgagctcaagaggggatctcctgatccatgggttgcaaagatccatgggagaagcatggtttctggggcggggtcacacgctcagtcactgtttccctcggatgccggagatggttcctttggctctctgccaatacagggtgaatcatcatccatccctcttttctttgttctcccgggtcaagttgtttgcctagtcagtcccaatgtgagaacctgaatatttcagttgacgcgctgacttcaaaatccccgggcttcgggaggcggagcttgcagtgagccgagatcccgccactgcactccagcctgggcgacagagcgagactccgtctcaaaaaaaaaaaaaaaaaaaaaaaaaaaaaagtccccgggcttttcttttcactcagtggaaggcagctgcttctaattggccatcttggcccgcccccaccacgtgaccttctgtaaaatgcctccactctccaggaacgctctcattatataactttgcctgaaaccaacagcacgctcattgcacatatcatgggctcatttatttcacttataaagaacctggccaaggaagagatagtgcctaaagtggccagtattctgaccgatatgttagaaaaatggtgtgccgaccaattcatgacatgtgtcccaaaactagcaacggaaattgtattcgccgtgttgaggtctctaatccagatgatgctcatctatgtactggaaaaggcagagtcctttcctgacaagctgctgaaactcttcagaaacatctcatatttcctgaagaagatgatgtctggacaagcagcacaggtcgttcagatttaactttctattcatatatccagcacgatattcgcacaattgtcacgaaaccttaccagttgatgagtcctgcacatttcctttaatttcaggaggaagagggtaatccggatgagttttctgacctactctgctgctgtgattaaacaaccaccaggaaattttgacgacactgttctcctgagctcctccctttcctccgggaacaaaacaattgaatttacaaaaataaagtgttatttgactggagtgaggtctcatgtctgcttatgcggtggctcgctgctcagaacagggtgagtctctgggttgtgtgctgaggaggggaggctctcaatctggagaaaacccactgcaggggacacctccatggggtctgagggactgaggatgaggagccggactgggtctagggaaggaggaggtttcagagggtgaaattctggcactaaagcctgggggtgtttgggaacttcctccttccgaagaagtttcagggagggataaagacaaaccctgggctccttgaggggcccttactaatttgagaggactctatcgggaaggagagtgacaatggcctccttgaggactgaggcccctgaataaatgaggcccagatacagtccatgggggatgagaccttcaagggtcacattttggttgggacagaggaaaagtgcagctctgcagccgcagaggaaaacccggcagtgtgaaagcgaccttggaggggccctgtgcgctctgaatgcgtctgagcccccatcccctgtccccgcctctctttctggattcttccagctcggctgtctccgccatcttctgagcgctccaccctgacttattcaagtttcccttctgccttccaagtactccaaaatctttcagatctgtgtccctacccctgtttttagcatgtgttggggctccaggtccctgaaggtttctggcctgaaatccacctccccagcggagtggactgcgttctagagactccacactccgcgaggttcccaggcccctgagggacaaccgagtggcctgcgcacttcagggctccacactcggcaaggtctttcaagcccttggggtccccttcttagttttttccacctttctgggctgcagtcactccataaatgctgggatctgatccccacccccactctcgtttcctcaattctgcgggctacacgctctggcaaggtcctccgggccctggatcccctccctctccctatgcccacgctcctagtcagcccttctggggtccactattttcaggaactaaccgttctcatggagccttgctaaccggaaagctgtgtggaagaaaggctttgaggatagaggtggagatttggctcttccatagtgccactcacccaccccaccatgctgccactgccagacccggacccctgtttcagaacaagtgaccagattcgctcctggacagccctggacactggccttttctctgaaaactactcaccctttctctagtccccacttcatgccagcctcataccctcttccttcccccacgctggcttccgggatcctcctctgctcagacaacctcttctgtgtcccacccccgtttttagaatgctttggggcaccaggttgggggaaggtttctggcctgatatccatctctttccaaactcccttcttcccttgaaaggcttcttgccttcagccccacttctggctccgaggtttcaggacaccctcctcttcatcctcattcttttgaccaccagctttttaggaattcgaacgtccctctcatcttcgtgaatcctgtccaggcatttgttgaccccttcatctgatacccctgacctcacattgccaaaagtctacccctacccagtacactggaattagacaaaatcccaggagttttacctcaactctgagtgtgcccacaggagctctccctgaagccacgtccttttaagcagggtctagggttcctcccttgtcttaatgaactctttgtcacacggaggacgttatggagcccttatgatctttcactgcctttctgcccagcgttttgtctttccatggacatttataatattttccatggacattttgttctctcaatgtccacccctaatttccaacatcccaaagattctcatgtgtttcctgaaagccatttacaggaatggctgtgcccagacccccttccccaggatcctccttcacacctggtaggtgcctctcctagagagatttgcactcagttgtcgtgcagtcacatggcccagatggttgttaatcacccccttcctggcaacagctagcagccagggaatcactggcacagaaacctcagggtgaccaagatgaggccacctctgtgctgaaggctgtgctccagagcctgcttgggatcaggcttaagcaggtcttcagccagacctgatgttacctggtttccttgagctgccctgcctgagctatcgggagcactccctcaatgcacatcttgattccctatctcatgctctgcttctagaaaccatgagctatcaattgctactggcaatggtcctgggaagtcaaccctaagtatggattctggggttggatgactccccacaggacttcagtgagcaacaatcactgctggcagttggaggacagagtcgctagggcatgtgaccactgtgaaaccaccgatgtttcacctggggtaattttggatgaactacggtagaagcactgaaggtacattgcttttggtttggaagattgtaggtaaataatagcgatatgaatgtggaattggatggctgcaaacgagtgccattgatgcattgaaagaggaaaagtcaggctgtcacctgtcactcagcaatttaaagtgtgagagttgggactagatgtggtggctcacatctataatccagagattcgggggaagcttgaagaggtaggatcttttgagtccaggagttccagaccagcctggacaccagagcaagacctcatctctacaacaaaattttcttaaaaattagatgggcttggtggcacgcacctgtacttgtagatctagctaatggggagcatgagataaaaaaatcacctgagtcagggacttaggggttacaatgaggtatgattgtgccagtgcacacactcccacctggccaacagagtgagattctgcttccaaaaaaataagaaataaatcaggtttgagagttggaaagcatcatcttctcctagagccaaaggacatgtacaactgagacccaggaacaaagcttcatcacaaagagaccatcatcagtggagccgggagatgcattccccctcaccctgccttgaggaggcagtggagtcatctgtctgggatcctttctgacccagccctatttgtttgtctctttggcttctttggatttgtatattttagctgttataacactgtaaaacaaacagagtgatttttttgagttgtgtgaatgatgctagctccatagtcaccctgagagtgatgggaacttttgaatttgtggcaagttggagggtagtgtaagtgacctgagattgccaaattggggctagcactggatgtgaggttaggctagtggaaaaatatgcccagaaccagaggagtgtgggctcactgcaggtggttaggctcagatccaaattgtacagatggatagctttggggtaaagaataacatagttgagaagtgcatgtgttagtctgttcatgcactgctataaagaattacctgagactgggtaattatttataaaactcaggtttaattgggtcatggttccacaggctgtacaaaaagtatgatgctggccatcagctcaacttctggggaggccccagaatagttagagtcatggcaaaaagtacaagggaagcaggctcatcttccacggccagagctggagcaagtggtaggagaggtgatacacactttcaaacaagtaggtcttttgagaactccatcaccggacagcacctatgggatggtgctaaattattcatgaaatatccgcctccataatccactcaactgtcaccagcgcagccagccccacctccaacagtggggattacaattccatatgaggtgtgggtggggacacagctccaacctcaatcagtgggcatcctggattgggtctactatagaaggagaaccaggagctgactatgatcttgaaccctacccatgatggccgggcggggtgactcatgcctgtaaccccagcactttgggaggctgaggtgggtggatcgcctgaagtcaggagttagagaccagcctggccaacatggtgaaaacctgtctctactaaaaatacaaaaaattagaccggcgttgtgctggatgcctgtaatcacaccactacgctccagcatgggaaaaaataccaaaacttcgtctcaaaaaaaaaaaaaaaaaaaaaaaaaaaaagactgcccatgaccactgcaccagtgagagggacaccagcatcactgagatgcaagggctggacattcttcataggtcagagctcaaagcaggggacactgatacagagatgggctccatccatagcaccaaagtggtgagaggatgtgggaatggcagaggccagcactttgccatcaatgcaagggggtataaggaggtgacaccagtgccagagtacatcacggggggactgccctacaatatctaggacttacctcttagagcgtgtttcattagcgacaacagatataaatggcagacaggtgtgtccctgcattaacaggaaatagaaatcatcaagaggaacagaaggcagatgtcagcagccccttagaaagtcatcatccttcatacagttaaaatctgagacagttctcacacgagaaggcctaactcaaaaagaggctgggttctcatgaggcaggtttatgcaaaaccaaggaaggtgtacaagtttggaattctccagtttcccttggaaaagacctacagtcatttgcttaggtaactgagcactgaacaaaggtgagtattgttgtcttttagaagctcttggccaagaaggccttgttggcataaaacccatggtttggaaacatcaccatgacccctgttagagtaatggcctaagggtgggggtcaggaaattgatgtattccttgccaacttctgcctctaagtgagtgaactctgtttgtgaacctctctcctctgtggttatgttcctaggctctcatgtataatcaggagtcatagacttagaaacaggaaaaatacttacagtgtttttgtggcctgtgagctatgacttataattttaggaaaaaaacaattgcaaatggaaagcctaagtctatcaatgctcatccaagacaacataatcaataaaaaccaatatcaaatctcaaggcaaattatttcctgtatatagatggcagagatgagcaccaccatcaaaaactcaaggaccagtgctgtgggtccagtcatctgtttcatggaattcaccagtctggtatcttcaaaatccagaaggatgatggcagatggcaggaaagtaatgcaaacgtcatcaggtgtgaccccactgtagcagctgtgatggatgttttctctcaccatagcaataaataacacaacctcggtcacactgtatgcattgttggtctgcaaaatccatgttttgcaaaactcttcaggaaggtggatctgtaatattggcattgacatgagaacaacagcagtatttattcacaatctcaagctctctgtcttcccgtctctctcattagccatccaagtagtcctgaggaaccaagcccatcagaacattctgcaacataatacacagctccattctccattcaaattttgttgttgttgttgttgttgatgagacaacatcttactccatcagccaggctgacgtacagtggggctatctgggctgactgtagtcttgagcttccaggctcaaggcatcctctcacctcagcctcctaagtggcttgaactacagacacacagcgacatgctgggctagtttttgtatattttgtagagacgtgctctcaccatgttattcaggctggactcaaactcctgagcgtaagtgatccaagcaccttggcctcaaagtgctgagattacaagcctgagccactgcacccagcccaatctccattctactgataacaatgtcattaccaggtctgatggacaggaaatggtaaggtttctgaaaacctaaggatcacacagcgagttccaaaggctgaaagtgcatacctgtcgacactgataccaatgacatccaatggtgagaatgacattccttgtagtcctagctctgctcataacaaatctatactgaagtgtaagagtttgatggtcatggggattttccatgtctctgcctttcagcgatgtgccatatctgtgaagtgttcagaaatgcaacagcctgaggcatgctgggcatatcctctaataaaaaggaaaatgccattttatggtcctgtatttctacaagttggaacacatgggcctgtgatccagatgggggaaatgggaatattcccactcattcaccttcatccacgaagcccatttgaaagctttgggcttcccatccttgtagattttagtgttgtgggctgggtgcagtggctttcacctgtactgccaacactttgggaggcctagacaggtgaatccactgaggccaaaagttcgagaccagcctggccaagatggtgaaaccccgtccctactaaaaatacaaaaattagcaaggtattggggccagcacctgtaatcccagctgctcgggaggctgaggctggagaatcgcttgaacccaaaaggcagagactgcagtgacccgatcctgcctttgcactccacctgggcaagcagaacaaaacttctgtcttgaaaaaaaaaacaaaaaacgaacaaaaaagatgttagagttctgggtttagaggtctataccccagaaagagaatggtttcaacaagggacaaagaagttgctttaaacgttgacttgccatttcttttcagtgtgtttgttctcttgcgtcaagagaccaccagaaaagtggtgcaattactctcctgtcaagaatcattgactatcatctgcaagagggtcagatcctggtatataattagggcagaaatacttagtctgagaagggtatgacatccagaggccctattaatgatgtccttttctccatgcctgactctgaccccatgtgctggactgcccctgtgtggatggcctcatggcctgctcggactctgaggtcccaccccaagtggcacctccatggagggctctactcttgtatgggctctgacactcacactgagacactctcccatggacacctcttcacccacttggggtctgaaactgggctactccatccctccctaacctggaacagagagctttcactgctattacacaagtcatagaggctaactcctcatttttccaagctaattattgaaacattagtcctgggttgataagacaagataagttaacttttcataaatttgcttatcaagttttgaataaattcaaataaattcaccttccccacacaccttagttgtcgacatcacacgcgcacccatactcacagggtgagcacgaaggcttcactgtcagtggagaaagtggcaaaacccttctgtgcctcatcctggtctagacctggccctcatcctttcccactcttcccctcactcccttggattcatccacactggcctcctgcctgctgctccacctccctgcgaagctcacccctgcctcagggcctttgcacgtgcagtggcttcaagccatatcctcttcacccagatctcccagatctcctgaatgatcttcttttatcattcaggtctcagcttgcatgtaatcttctcagtgaggattacccaaaccacatagttcattcattcattcaaatattcattcaatggcatattgacaaagcagctacttcatgccaggccttgggccaggtgttatggatatggcaacaaacaaaacaagagttttctgctctcaaatttttacccacttaaaggagatatcatacatcatctgtaaataaatacatcatctgtaaataatgatgtaaataaatacatcatctgtaaatctgtaaataatgatgtaaataaatacatcatctgtaaataaataaagtataataaaagaaaatagtaggtttttttggttggaggtgaccgtgaagtttgcaaataccatcttacaacacattattttattttatttcatttcatttttaattttattattattatactttaagttttagggtacatgtgcacaacgtgcagatttgttacatatgtatacatgtgtgaagttggtgtgctgcacccattaactcgtcatttagcattaggtatatctcctaatgctatccttcccccctcccccaccccacaacagtccccggtgtgtgatgttccccttcctgtgtccatgtgttctcattgttcagttcccccctatgagtgagaacatgcggtatttggttttttgtccttgtgatagtttgctgagaatgatggtttccagcttcatccatgtccctacaaaggacacgaactcatcattttttatggctgcatagtattccatggtgtatatgtgccacattttcttcatccagtctatcattgttggatatttgggttggttccaagtctttgctattgtgaagagtgccgcaataaacatacgtgtgcgtgtgtctttatagcagcatgatttataatcctttgggtatatacccagtaatgggatggctgggtcaaatggtatttctagctctagatcactgaggaatcgccacactgacttccacagtggttgaactagtttacagtcccaccaacagtgtaaaagtgttcctatttctccacatcctctccagcacctgttgtttcctgactttttaatgatcgccattctaactggtgtgagatggtatctcactgtggctttgatttgcatttctctgatggccagtgatgatgagcatttcttcatgtgttttttggctgcataaatgtcttcttttgagaaatgtctgttcatatccttcacccactttttgatggggttgtttgtttttttcttgtaaatttgtttgagttcattgtagattctggatattagccctttgtcagatgagtaggttgtgaaaattttctcccattctgcaggttacctgttcactctgatggtagtttcttttgctgtgcagaagctctttagtttaattagatcccatttgtcaattttggcttttgttgccattgcttttggtgttttagacatgaagtccttgcccgtgcctatgacctgaatggaaatgcctgggttttcttctagggtttttatggtttgaggtctaacatgtaagtctttaatccatcttgaattaatttttgtataaggtgtaaggaagggatccagtttcacctttctacatatggctagcctgttttcccagaaccatttattaaatagggaatcctttccccacttcttgtttttgtcaggtgtgtcaaagatcagatagttgtagatatgtgacattatttctgaggactctgttctgttgcattggtctatatctctgttttggtaccagtaccatgctgttttggttactgtagccttgtagtatagtttgaagtcaggtagcatgatgcctccagctttgctcttttggcttaggattgactttgcaatgcggggtcttttttggttccatgtgaactttaaagtagttttttccaattctgtgaagaaagtcattggtagcttgatggggatggcattgaatctataaattaccttgggcagtatggccattttcacgatattgattcttcctacccatgagcatggaatgttcttccatttgtttgtatcctcttttatttcattgagcagtggttttagttctccttgaagaggtccttcacatcccttgtaagttgggttcctaggtattttattccctttgaagcaattgtgaatgggagttcactcatgatttggctctctgtttgtctgttattggtgtataagaatgcttgtgatttttgtacattgattttgtatcctgagactttgctgaagttgcttatcagcttaaggagattttgggctgagacaatgggttttctagatatacaatcatgtcgtctgcaaacagggacaatttgacttcctcttttcctaattgaataccctttatttccttctcctgcctaattgccctggccagaacttccaacactatgttgaataggagtggtgagagagggcatccctgtcttgtgccagttttcaaagggaatgcttccagtttttgcccattcagtatgatattggctgtgggtttgtcatagatagctcttattattttgagatatgtcccatcaatacctaattattgagagttttcagcatgaagggttgttgaattttgtcaaaggccttttctgcatctattgagataatcatgtggtttttgtctttgggtctgtttatatgctggattacatttattgatttgcatatattgaaccagccttgcatcccagggatgaagcccacttgatcatggtggataagctttttgatgtgctgctggattcggtttgccagtattttactgaggacttttgcatcaatgttcatcaaggatattggtctaaaattctcttttttggttgtgtctctgcctggctttggtatcaggatgatgctggcctcataaaatgagttagggaggattccctctttttctattgattggaatagtttcaggaggaatggtaccagttcctccttgtacctctggtagaattgggctgtgaatccatctggtcctggactgtttttggttggtaagctattgattattgccacaatttcagatcctgttattgctctattcagagattcaacttcttcctggtttagtcttgggaaggtgtatgtgtccaggaatttatccatttcttctagattttctagtttatttgcgtagaggtgtttgtagtattctctgatggtagtttgtatttctgtgggatcagtggtgatatcacctttatcattttttattgcatctatttgattcttctctctttttttctttattagtcttgctaccggtctatcaattttgttgatccttttaaaaaaccagctcctggattcattaattttttgaagggttttttgtgtctctatttccttcagttctgctctgattttagttatttcttgccttctgctagcttttgaatgtgtttgctcttgcttttctagttcttttaattgtgatgttagggtgtcaattttggatctttcctgctttctcttgtgggcatttagtgttataaatttccctctacacactgctttgaatgtgtcccagagattgtggtatgttgtgtcttttttctcgttggtttcaaagaacatctttatttctgccttcattttgttatgtacccagtagtcattcaggagcaggttgttcagtttccatgtagttgagcggttttgagtgagtttcttaatcctgagttctagtttgattgcactgtggtctgagagacagtttgttataatttctgttcttttacatttgctgaggagagctttacttccaagtatgtggtcaattttggaataggtgtggtgtgatgctgaaaaaaatgtatattctgttgatttggggtggagagttctgtagatgtctattaggtccgcttggtgcagagctgagttcaaatcctgggtatccttgttaactttctgtctcattgatctgtctaatgttgacagtggggtgttaaagtctcccattattattgtgtgggagtctaagtctctttgtaggtcactcaggacttgctttatgaatctgggtgctcctgtattgggtgcatatatatttaggatagttagctcttcttgttgaattgatccctttaccattatgtaatggccttttttgtctcttacgatatttgttggtttaaagcctgttttatcagagactaggattgcaacacctgcctttttttgttttccattttcttggtagatcttcctccatccctttattttgagcttatgtgtgtctctgcacgtgagatgggtttcctgaatacagcacactgatgggtcttgactctttatccaatttgccagtctgtgtcttttaattggagcatttagcccatttacatttaaggttaatattgttatgtgtgaatttgatcctgtcgttatgatgttagctggttattttgctcattggttgatgcggtttcttcctagccttgatggtctttacaatttggcatgtttttgcagtggctggtactgactgttcctttccatgtttagcgcttccttcaggagctcttttagggcaggtctggtggtgacaaaatccctcagcatttgcttgtctgtaaaggattttatttctccttcacttatgaagcttagtttggctggatatgaaattctgggttgaaaattcttttctttaagaatgttgaatattggcccccactgtcttctggcttctagagtttctgccaagagatcagccgttagtctgatgggcttccctttgtgggtaacccgacctttctctctggctgcccttaacattttttccttcatttcaactttggtgaatctgacaattatgtgtcttggagttgctcttcttgaggagtatctttgtggcattctctgtatttcctgaatttgaatgttggcctgccttgctaggttgcagaagttctcctgggtaatatcctgaagagtgttttccagcttggttccattctccccatcactttcaggtacactaatcaaacgtagatttaatcttttcacatagttccatatttcttggaggctttgtttgtttctttttactctctttcctctaaacttctcttctcacttcatttcattaatttgatcttcattcacttatatactttcttccacttcatcaaatcggctactgaaggtattgcatgcatcatgtagttctcatgccatggttttcagctctatcaggtcatttaaggtcttctgtacattgttttctctacttagccattcgtctaatcttttttcaaggtttttagcttccttgtgatgggtttgaacatcccctttagctcagagatgtttgttattactgaccttctgaagcctgcttctgtcaacttgtcaaagtcattctccatccagctttgttccattgctggtgaggagctgcgatcctttggaggagaagaggtgctctggtttatagaattttcagcttttctgctctggtttctccccatctttgtggttttatctacctttggtctttgataatggtgacctagagatggggttttggtgtggatgtcctttttgttgatgttgatgctgttcctttctgtttgttagttttccttcgaacagtcaggttcctcagctgcaggtctgttggagtttgccggaggtccactccagaccctgtttgcctgggtatcaccagcggaggctgcagaatagcaaatattgcacaacagcaaatattgctgcctgatccttcctctggaagcttcgtctcaaaggggtgcctggctgtatgaggtgtcagttggcccctactgggaggtgtctcccagttaggctagatgggggttagggacccacttgagaaggcagcctgtccattcacagagctcaaacactatgctaggagagccactgctctcttcagtgctgtcagatggggatgtttaagtctgcagaaatttctgctgccttttattcagctatgccctgcccctacagatggagtctacagaggcaggcaggcctcattgagctgcggtgggctcctcccagttcgagcttccagaccactttgtttacctactgaagcctcagaaatggtgaacacccctcccccacccagtctgccgccttgcagttccatctcagactgctgtgctagcagtgagcgaggctccatgggcgtgggacccactgagccaggcacaggatataatctcctggtgtgccatttgctaagaccattggaaaagcacagtattaaggtgggagtgtcccaattttcccagtacagtctgtcacgggttccctcatctaggaaaggtaaatcccctaaccccttgtgcttcccggtgacgcaatgccccaccctgcttcagctagccctccatgggctgcatccactgtccaaccagcccaatgagatgaacaaggtacctcagttggaaatgcagaaatcacccatcttctgtgtggatcaggctgggagctgcagaccggagttgctcctattcggccatcttggaatggcaatctatgtttgctttttacatttgaaaaaactggtgtcacgtacctaggtattaatcattgtggtatcctcttgccgatttacctctttatcattaactagtgaccctccttgtcttttgttgttacagtctgtgattttagtctattttatctaatatgagaatagctactctggcacttttttggtttccagcttcatgaaatatccttttccatttccctgttttcatttccctttcggtgtctctatagatgaagttgatttctttaaggcaccataagttgggtcttatttctttatccatttgaccatttagagaatttagaacactgtcagtgttattattcataagtaaaaacttaagagtgggtgtagtggtgtacatctgtatttcctgcactttgagagactgaggcgagctgatctcctggggtcaggagtttgagaccggcctggtcaacatgatgaaaccctgtctctactaaaaatacaaaaattagccaagcatgctggcatgtgcctgtaatccaatttacttgggaggctgaggcaggagaagcttgaacctgggagacaaatgttgcagtgagctgagatcacacagagaagtcatctccactctcctcatcagaacctcttgttcacagcatttgtgagcacaaatcaatgatggttattctttcctactaattagggatattttattacacagcaatagcctccagcaaagggaaccatcatacatgattcctacaagttgacagggctggaattatcactgaaaaactaaggtggctatacttgattcccaatgtccaatttttcatgaatagagaaatttatcctttttccccccagccagaaaccaagttttgctcttacgcccaggctggaatcaagtggcacaatctcagctcactgcaacctctgccccccagcttcaagaaattcaccttttgaacaaggagatattaaggatacactatgtgtatgctaccggtggttgcaggagactcagaaaagagagaaacagtcactggcctcgtgcaactgatattctcgggaggagagaaaggcaatcaagaaagaaacatgctgtatttcagacagctgtaagtcctccacaagaaaagaaagcaggtgaggaacataggaaatgtgtcaaccataaggttcccgctaattctataagttggtcagggatatcctccaagaataagcagcatctgagcaatcacctgaagggaggaaggaaggaagactgtgagtggtggcttacacctgtaatcccagcactttgggaggccaaggagggcagattgcctgagctcaggagttcacgaccactcagagcaacctgttgatacccaatctctactaaaaacacacaaaaaaattacccgggtgtggtggcacgcacctgtagtcccagcttccatgcccagctgatttctctctctccatatatatatatatatacacatatattgtttttgcagagatagggtctcactgtgtcacccagtcatcaagcaattctcttatactgttttggaaaagcatgggaattacaggtgtgaaataccctgctggtcctgaaaaatgtgatatttgggattctctgcctggcttgttttacccaaaataatgacctccagttccttccaggttgctgcaaaagacatgattttcactgttttataactgaatagtattcctgtatgtatacataccacattttctttatttattcttctgttgattgacatgtagggtgattccatgtctttgctactgtaaataatgctgcagcaaatatttgtgtgcattttgatctattcctttgagtaggtacccagtactgcaactgcaggactgagtagttgttatattttttgttctttcagaaatctccatagtgtttgccataaaatctgcactaatttacattcccaacaacaatgcataagatttccccttttctccacattctcactaacatttgttatgtttttgtctttttcataatacccattctgactggagtaagatatctcattgtggtggttgttgatatttttgagacggggtctcactctgttgccagactggagtgcagtggtgtgatcgtggcttgctgcaacctccacctcccgggttcaagcaattctcctgcctcagcctcccgagtagctgggactacaggcgcgtgccaacaggcctggctcattttttgtatttttagtaaagacagggtttcaccatgttggccaggatgatcacagtctcttgagctcatcatacacctgcctcagcctcccaaagtgttggaattacagtcatgaggcagcgcacccaacctcaatgtggttttaatgaccatttctctgacgattcatggtgtggagaatttctttgaaataccttttggccatttatatgtgctcttttaaaaactgactcctgtccaggtgcggttgagcatgcctgtaaccccagaacttcgggaggctgaggccaatggatcacttgaggcaaagaggcagaaatcagcctggccaacaaggcaaaaccccatctttactaaaaatacaaaaaatcagccacgggctgtgactcgtgcctgtggtgcaagttactcaggaggttaaggcacaggaattgcttgaacccggtaggcacaggtcacagtgagccaagatcatggcactgcactacagcatgggtaatagagaaagacctgtctcataaaaacaaatgaataaataaataagataaaaaataaaaaagtctctttatgtcctttgccgactttttaatgggattctttggagttttctgttgtagttgagatctttgtttactctcggtattagtcttttgtcaaaggaaaagtttacaaataatttcttccgttctgcagtttgtctgctcactctgttgagaggattatttctttggctgtgcagcagctttttgtttcagtaaagcttttgaatttatataattaaaattttcagtttggtttaaatttgcactggtcgatttttggttttgttgcctgtacttttgaagtcatactcttgaactctttactagacaataaccagaagagttttctctagttttcttctcacatttttattatttcagtacatatatttaagtctataattcatcttcaattgatttttgtagaaatagtgagaaataggagtccaggtttattcttctgcaaatgacaattcaattgttccagcaccaattattgaaaagggtgtgctttcctcaacgtatattcttatcagctttgtcaaagatcagttggctataaatgtgtggctttctttctgggctctctagtctgttacatcaatctgtgtgtctatctgtatactactaccatgctgtattggtgatgatggctttgtaatataatttgaagtcaagaaatgtgatgctcccagctttgtttatttgcttcagaaaggctgagtcaacagctgcagagatgaagctgcccctcctcgcagggctccttcccggaaaaagatcatggctcccactgaccatataaccatggctggaactcctgaaattcccaaagggaggccctacccagtgaggggggatgaatgaaggtcctacttaaggaatctgtctggccacaatcaggcacagcagctgtgctgccttgtgggggaccagaccacctggattccctggagcctgcaggctagaatgtctgagtccatggaaacacagaaatggaggccgccctcacctccccagaaaactgtagtctcaggcagtctccagccgattgccactggttggctgctattccaagccagtgggtcttaacttgagaggtgctgtggaagtggggcccacggaatgaggctgcttggctccctggattcagccccttttctaagggaatgtacagatggaactcccgccttgcccagctttccaagtatataaaactcctgagtctctgtgagtgtctgagcgagtgctctggcaacattcgacacggctctgtgtatctgacccaagacccttatggcatgagctaatgggaggatcttctgatccatgcgtggcaaagatgcatgggagaaacatggtttgtgggtaggggttgtgcattcactactgcttctcttggctgtaggtgaaggtttctttggctctgtgctgatactgggtgcaccatcacccaccccctttgtttcttctcctgggtcaagtcatttgcctaatcagtcccaatgtaggaacctggatacttcagttcaaggtgctgaattcaccgtgcttttcattcaggggaagacagctgcttctcattgggcatcttggcctgcccacttcacgtcactttttgtaaaatccacaccactccaggaatatccattacttaacttcgcctgaaataaacagaaggctcattacacttatcatgggctcacttacttcgcctataatgaaggtgccatggaaatgctagtggatgacgtggtccattttcttagggatgagatagaaaaatggtgtatggctttttaatttaattaaaatttttagtttggtttaaatttacattggtctctttttggttttgttgcctgtacttttgaagtcttactcgtgaactctttactggacaatgaccagaagagttttccctaagtttcttctgatattttgaccatttcagtacatacatttcagtctataattcactttaaattgatttttgtaaacatggtaagaaataggagttcagatttattcttccgcatatgataatgcaactgtcccagtaccaattattgaaaagggtgtgctttccctagtgtatattcttgtcagctttgtcaaagatcagttgcctatgaatgtgtggctttcattttggattctctcgtctgttacatcaatctgtgtgtccacatttatacctgtaccatgctgtattggtgactatggctgtgtaatatattttagagttaggaaatgtgatgctcccagctttgttcatttgcttcagctgaaaaggttgagtccacaattacaaagatggcagccgcccatccccggaggacctccaacccagaaagagatcaggcttcccaccaaccctataaccctggctggagttcctgaaattccaacagggaggaccttcccagtgaggagggatgaatcaaggtcaaatttaaagaaacagtctggccactatcaggcacagcagcagtgctgccttgtgggggacccctcctgctccagaccagctgccctccctggagcccgaaggctagattgtctgagtctacggaaacagagacggtggccgccccaaccacccagaactcggtagtctcaggcacttggcttgctatcttgccactgcttggctggtattccaagcccgtgggacttgagaagtgctgtgatgatggggaccacaggatgaggctgtctggctccctgtgatatggctgtgatgagtggaggaacaccagggctcatgtctcacacagaattggagaaaatgacacaaacacatgtacagtggttttatggcgtgcagtttaataggcaagaacgaaggaagagctccccatactgagacagagggaggggggctccaaagccaaaagaggaaacccggagtgctgtggataccaatgagttatatgaagaaactggagggggcggtgtctgatttgcatagggttcaggcgattggttcgaccaggcatgtcatttatgtggcccacggaaaaactggccctcccacctagcctttgaatatgcacgtgccggacaccctgatttcctacactcatggggatatatgggggtggccatatcgccaggcacaggtggggacaagggccagaagagggcgggaatcgctatgtttgggtggacccagtttctaatggccggcatctgcagatcaaggttaccggagaactctaaaagccggggctttcctgctagacaagactcatttctggagctgctttaaaaagaaacaaaacttcccaaggaccccttttcctccctgtctgcccaaaataatttcttaacaactcgtataacacctgaattcagcccccttactgggggaatgtaccaacggaactcccacctttcctggtttctcaaggctagattgtgtaaacctcctgggtctcggtctgtgtctgagcagctgctctgccaacactccacacagccctgtgtactaggcccaaggccgccgtgactcagcccatgggaggatctcctgatttcttggttgcaaagatccatgggagaaaaatggtttctggggcggggtcacacactcatggcttctcttggctgtgcaagaaggttcctttggctctgttccaatatagcgtggttcatcacccacccctgttttctttgttctcctgagtcaagttgtttgcctagtcagtcccaatgtgagaacctgaatatttcagttcacgtgcttatcgtgaaattcactgagactttaattcagtggaaggcagcctcttctaattggccatcttggcccgccccctccacgtcacctcccataaaatggccacgctctccagggacgatgccattatatatctttacgtgaaaccgacagaacacttattacactttttgtgagctcatttacttcacttataatgaacatggccatggaaatgctagtggagaaagtggtcgattttctgatggatgtgataaaaaaatggtttgccgaccaattaatgacatatgtctcaaaactagtaacgagacccttaatcgctgggttgaagtttctaatcaagaagatgctcatctatgtattcaacaaagcagcttcccttgcttctgaaatgcttccaaacaacatctcatatttcctgaagaagataatgcctggacaagcagcacaagtcattcaggtttactttcagctcataaatccagcaggatattcgcacaattgttgggaaaccttatcagttcatgagtcgtgcatgtttcctttaatttcaggaggaagagggtaatctggaagagtttcctgacctactctgctgctgtgattaaacaaccaccaggaaattttgatgacactgttctcctgagctcctccctttcctcggggaagaaaagcattgaaactacaaaaataaagtgttatttggctggagtgaggtctcatgtctgcttatgcggtggctcgctgctcagaacagggtgagtctctgagttgtacgctgaggaggggaggctgtcaatctagaaaaaacccattgcatgggacacctccatggggtctggggggctgaggatgaggagctggactggatctagggaaggaggaggtttcagagggtgaaattctggcagtaaatcctgggggtgtttgaaaacttcctccctcagaaggagaagactcagggaggaataaggacaaaccatgggtcccttgaggggcatttactaacttaagaggactttatcgggaagcagagtgacaatggcctccttgaggactgaggcccctggataaatgaggcccagatccagatccagtccatgggagatgagaccttcaagggacatatttttgttgggacagaggaaaagtgcagctctgcagctgcagaggaagccttggcagtgtgaaagcgaccttggagggggccctgtgcgttctgaatgcttctgaggtccatcccctgtccccgcctctttttctggattttttgggctccatggtctccgccatcttctgagcgctccacgctgccaccttcagttttctcttctgggctccaaatactccaaaatctttcatatctgtgcccctacccctgtttttagcatgtgttgggactccaggtccctgaaggtttctggcctgaaatccacctccccagcggtgtggattctgctctagagaccccgcacttggcaaggttcccaggcccctgggggacaaccgagtggtatgtgcacttcagggctccacactcggcaaggtctttcaagcccttggggttccctcctcagttttcttcacatgtctgggatgtagtcactctataaatgccgggatgtgatccccaccccagtgattttttttagttccatgagtgttgctatctgaatagtcatcctgagagtgatgggaccttttgaatttgcagcaagttttagattagtgtgagtggcctgagatcgcaaaactggggctagcattggatgtgaggttaggctggtggaaaaatttgcccagaacctgaggagtgtgggctcactgcaggtggttaggatcagcacagaattgcaaggatgtatagctttggggtaaagaataacatggttcagaagtacatgtattagtcttttcatgcattgctataaagaattacctgagactgggtaattaattataaaaactcaggtttaattggctcatggttccacaggctgtacaaaaaggatgatgctggccatcagctcaacttctggggaggcgtcagaaaacttagagtcatggcaaaaagcacaagggaatcaggctcatcctccatggccagagctggagctagtggtaggagaggtgctgcacacttttgaacaatcagatctttttagaactctatcaccagacagcacctagaggatggtgctaaattattcatgaaatatccacccatatgatccactcaattctcaccggcccaaccaggaccacctccaccattggggattacaattacacatgagatgtgggtggggacacagatccaaactcgatcagtgggcatcttggactgggtctactatagaagaagaaccaggagctgactatcatccttaagactgcccatgatggccaggcagggtggctcatgcctgtaatcccagcactttgggaagccaaggtgggtgaatcccctgaggtcaggagtttgagaccagcctcgccaacatggtgaaaccctgcctctactaaaaacacaaaaaattagatgggtgttgtgccagacgcctgtaatcacagctactccagaggctgaggcatgagaattgcttgaacctgggaggcggaggtggcggtgagccccaatcgcactgctacactccagcatgggcaacaataccaaaacatcgtctcaaaaaaaaaaaaaaaaaaaaaaaaggctgcccatgaccactgccccagtgagagggacaccagcatggctaagatcaagtgctggacattcttcatgggtcagacattaaagcaggccacactgttacagagatgggctccattcatagcaacaaagtggtgagaagatgtgggaatggcagaggccagcactttgccatcaatgcaaggtgggcataaggagctggcaccagtgccagagtgcatcaggggaggactgctttgcaatatctagcacttacctcttagagtatgtttcattagggacaacagatataaatggcagacaagtgagtcccttcagtaacaggaaatagaaatcatcaagaggaacagaaacagatgtcagcagccctcatataaagtcatcatccttcatccagttaaaacctgagacagttctcacataagaaggtctaattcaaaaagagactgggttctcatgaggcaggttcatgcaaaaccaagggaagtatacaactttgggattctccagcttcccttggaaaagacctacaatcatttgcttaggtaactgagcactgaacaaaggtgagtattgttatctttcagaagctgttggccatgaaggtcttgctggcataaaacccatggttggaaacatcaccatgacccctgttagagtaatggcctaagggcaagggtcaggaaattgatgtattccttgccaacttctgcgagacgagtgttggtccactcatctctttcacggaattcaccagtctggtatcttcaaaatccagaaggatgatggcagatggcaggaaactaatgcaaacaccatcagttgtacctccactgtagcagcagtaatggatgttatctcttcattgtaatatccagggagggagaagatgacattattctcaatattctaaacaccctgtgtgtacagcctctgtgatattttttgtaatatccgtgtgggagagaattatattactcctaatatctcaggggttgtgccccctctgtgacaatgttcctaacacccaggaggggataggatgatatcacttttagcatcacagggggtgtacaccccactgtaatattgttcataatatccgggggggagagaatgatattactcccaatatcgcaaagactgtacaccaacctgtgatattatttgtaatatccataagaggaagaataatattactcccaatgtcacaggaagtgtacacccttctgtgatattgttcaaaagatccagttagggaggggatgatattactctcaatatcttaaacaccctgtaggtaagccctctgtgatattcctcataatatccagagggagaggatgatattactcccaatattgcatgaagtctacaccccacctgtgatattgttcctaatatccaggatgggagaggatgatattactcccaatgtcgcaggggatgtacaccttccctgtaatattgttcgtaatatctagaaaaggagaggataatattactttcaacatcgcagggggtgtacaccttccttgttatattgttgctaatatccagggaaaaagaagatgacattaccaccactattgcagaaggtgtacacccccccttgatatagttcctaatatccagaaaaggagaggagatattactccaaatattgcaagaggtgtacattcccctgtaatatttttcctaacattcaggaagaaagagagtgatattgcccttaatattgaagggagtgtgccccccccgtgatattgtttctaatatccaagaaatgaaaggatgatattactcccaatatcacaggggctgtacagccccctcccatgatattgttcccaacatcggggggggggtgaaatagtattattcccagtatcacaataggtgtacacacctgtcgtgatattgttcctaatacccatgggggaaaggacgatattattcttaatatctcagagggatgtacaccctccctgtgatattgttcctaatatccggggtgggagaggatgatattacccccaaaatctcaaagggtgtacacccctcttgtgatattgttcctaatatccagggtggagaggataatattattcccaatatccaggaaaggaaacgatgatgttactgtgaatattccagggggtgtcctcccctctgtgatattgttcctaatatccaggttggggagattatgatatttctccaaatatcacaaggggtgtacaccaaccctgtgttattgttcctaatatcgatggggggagaggacgatattactcccaatatcacagggggtgtacaccacctttatgatattgttcctaatatccatgaagaaagaggatgatattactttcaatatcgcaggggatgtacactccccctgtgatattgttagtaatacctaggagaagaaagtgtgatattactcccaatatcgcaggggatgtacacgcttcctgtgatattgttcctaatatttagggggaaaggggatgatattactcccaatatcgaatggtgtgtacacccccccgtgattctttttttttttttttttttttttttgagatggagtcttgctctgccgcccagactggcgtgcaatggcgcaatctcggctcactgcaacatttgcctcccaggttcgcacgattctcctgcctcagccttcggagtagctgggattataggcagctgtcaccataccaggctaatttttgtatttttagtagagttggggtttcaccatgttggtcaggctggtcttgaattcctgacctcaaataatccacccaccttggcctcccaaagtcctgggattacaggcataactttccctgtgatattcttcctaatattcaggaagaaagaggatgatattgctcccaatatcgcagagagtgtgcactcctcctgtgatatggttcttaatattcagaggaggagaggatgatattactttctatattgcagaaggtgtacacctccctcgtgatgtctttcctaatatccagtgggggagaggttattagtctcaaaatcacagaaggtgtaaacccccatttgatattgttcctaatattcaggggtggggagagaaaggtattactcctagtatttcagggcatgaacacccccaccgtgatatcattcctaatatccagaaggggaggcaatgatatttctcctaatatcacaaagggtgtacaccccttctgtgatattgtaaatattctgtgtgtacacccccctgtgttatagtctgtaatatccgggtgggggagagggtgatatttctccccatattgtaggggatgtacacccttctgtgatatggttcgttatatccagggaagaaaaaggtaatattgctgcccatattgtggagagtgtacacccccatgtaatatggttcgtaatatccaggagtggagagggtgatactgctccttacatcgaggaaggtgtacaccttattgttatatgattcgcaatatccaggggaggagagagtgatattgctccccatgtcgcagggggtgtaaaccctccgtgatatgattggtaatatccaggaaaggaaagggtgatatttctccccatatcgcgggggacgtacatcctcctgtgatatggttcgtaatatccaggaggaaagaggaaaatattgctcttcataacccgaggggtgtacaacccctgtgatatggttcgtaatacccagaagtgtacacccctctgtgatatggtttgtaatatccagggggttagagggtgatattgctccccatatcgcagtgggggtacacccccctggattggttcataatattcatggggggagaaatttacatttatcctcatatcagggggggtgtacaccccccgtgatatggttcgtaatatccaggggaagaaagggtgatattgctccttatatcgcggaaggatcaccctcccctgtgatatggttcataatacccagacgggaagagggtgatattgttcttcataaagcgaagggtgtacagccccctgtgatatggttcataatatgcaaaaggggagagggtgatattgctccccatatcacggagggtgtactcccttctttgatatggttcgtaatatccaggggtgtagatggtgatatagctcgccctattggggagggtgttcacccctctgtgatattgttcgtaatgtccagggaaagagaggatgatattactcccaatatcgcagaaggtttacaccactctgtgatattgttcataatatccagggaaggagaagacgatattactcccaatatggcagggggtgtagaactcctgtgatattgtttgtaatatccaggcaaggagaggatattactctcaatatcgcagaaggtttacacccctatgtgatactgttcatgatatccagggaaaaagaggatattactccctatatcacaaagggtgtacacccctttgtgatattttttgtaatatccaggggagagaggataatattactctcaatatcagaaggggtgaaaaccctcctgtgtcattgttcataatatttagggaaggagagagtgatattactccaaatatcacagtgggtgtacacccccctatgatattgttcctaatttccagaaggggagatatgatattattgccaatatcgcagaaggtgtacaccttactctgacattgtttgtaatatccagatggggaaatgatgatattactcctaatatcacagggggtgtacacccccttgttttattgtttgtaatattcaggggaagagacgattatattactcccaatatcgcagggtgtgtacaacactctatgatattgttcataatatccaggggaggagaggaagtgtacacccccccgtgatattgttcgtaatatccagaggtagagaggatgatattactcccaatattgcaggtggtgtacacctttctgtgatattgtcatgatattaagaaggggagaggatgatattactaacaatatcacaaaaactgtacactccctgtgatattgttcataatatccagaagaagggaggatgatattattctgaatctcgcagaagatatacaccaccctgtgatatggttcataatatcctaggggaaagaggatgacataactgtcaatatcgcagggggtgtacaattccctgtgatattgttcacaatattcagagggaaaaaggataatattactttcaatatcgcaggcggtgtacacattactgtgttattgtttataatatccggaatgagagaaaattttctcccaatatcacaggaggtgtacactcccctgtgatattgttcgtaatatccagggaggggagaggatactattactcccaacatctcagggagtgtaggccccccctttgatattgttcctaatattcggaagtggagaagatgatattacttccaaaatcgcagggggtgtacactccctctgtaatattgtttctaatattcatgagtggaaagaaagatattactcccagtattgcaggggacatacaccacactgtgatcttgttcacaatattcgggggggagaggatgatattactcccaatatcaaagtaggtgtacacccccttctgatattgatcgtaatatccagaattaaagatgataacgttactcccaatattgcagggggtgtacatttttgaatactgttcataatattaagagggggaggggatgatatctgtcccaatatcgcaaagtgtgtacacctcctgtgacattgtcccaaatatccagaggaaaaaaggatgttattactcttaatatctcagagagtgtacacctccctgtgatattgtttgtaacatccagaagaaagaggctgatattactcttaatatcgcagggggtgtacacccccgccccgggatattattcgtaatatccagggggaagtggaatgttcagaatgggagaggatgatattacttgcaatatcatagtgggtgtacaccccactgtgatattgtttgtaatatccgggaaaggagaaaatgacattcctccccatatggcaggggctgtacaccacctatcatattgttcaaaatatccagaaggggagaggatatgtctccaagtatcacagggggtgtacaccccgctgtaatattcttcctaatatccagggtgtgagaggataatagtactcccaatatcccagggcatgtacaccccccttgtgatgttgttcctaaaattcatggggagaaagaatattactcccaatatcacagggggtgtacatacactctgtaatattgttgccaatatgcagcaggagagaggatgatattactcccaatatcacaggggctgtacaccccgctgggatattgtttctaatatcaagggggaaaaaggatgatattactcccaatgtcgcagggtgtgtacttcctctttgtgacattgttcctaatatccaggagagaagagggtgacattccttccaaaactgaaaggggtgtacacaccctttgagatattgtctttaatatccagaacgaaacaggatgatataactcctaatactgcaggggggtacaccctctctgtgatactgtttctaatatccaggaggggaaagaaaaatattaatcccaatatcacagggggtgtacattccccctttaatattgttcctaatatccaggaagacacaggatgatactatttccagcagcacagggcatgtacacccctttgtgatattgttcctaatatccaggaaaagagaggatgatattactgtcaatattgcagggcgtatacactggttctgtgatattgtttctaatatccgggggtggagaaaatgatattactcccaatattccagcgggtgtacacccgttctatgatattgttcctaatatctgggggagagagaatgatattattgtcaatatcacaggggatgtacagattccctgtgatattgtttctaatattcacagggggagaagggtataatactcccgatatcgcagggggtgtacactccccctgtgaagttgttcctaatatccagggattgagagaatgatattactcccaatatcacaggcggtgtaaaccccctgtgtgatattgttcctaacatccagaggaaaagatgatgatattattttcaatatcacagggggtgtacgcatccctgtgatattgtttctaatatccaggggaggagaggatgatattattgttaatatcgcagggggtgtaccccaccctgtgatactgttcctaatatccggggtggaagaggataatattgctcccaatatcgcaaagggtgtacaaccttcctgagatattggtcctaatatccagggagggagaggatgatattactttcaatatcacagggagtttacacaacccctgcgatattgttcctaatatccagcggaagaagagttaggataatactattttcaaaattgctgggtctgtaccccctccccgtgatattgtttctaatatccaggaggggagaaagtaatatgactcccaatatcttagaagatgtacaccctccccataatattatttcttacatccagggggtagaggatgattttgctttcaatatcacagagggagtaaacctttccggtgatattgtttttaatatttaaaaagagagaagataaaattactcccaatacaaaggggatgtattgtgtactcccccctctgatattcttttttaatatccagatggagagaggatgatattactttcaatattgcatgggatgtataaatcccctgtgttattgttctgaatatacaggtggggagagtatgatattactccaaatatcgcagggggttctttccccctgtgatattgttcctaacattcagggagggagaggatgatattactcttaatattgcagggggtgtacccacgcctatgatattgttcctaatatccagagggggagaggatgatctaactcagaatatgacaaggggtgtacacacagcctgtgatatggttcctaatatacaggggagaaggggataatatttctcccaatatcgcagggggtgtacaaccccctgtgatactgttcctaatatacagaaggggacagcatgatattgttcctaatatcgcaggaggtgtacaacgccctgtgatattgttcctaatatccagggcgggagaggatgatattaccctcaatatcgcagggggtgtgcactttccctgttatattgttcctatgatccgggtggggggaaatgacattagtcccaatatcgcaggatgtgtgcaccgctcccccgtgatattgttcctaatatcaagggggagagaggaggatattactcccaatatcgcaagggatgtacatcctccatgcgatattgttcgtaatattcaggaggagagaggatgatattactcttaatatcgcagaaagtggacacccaccctgtgatgttcttcataatatccagggaagcagacgattatatgactttcaatatcgctgggagtgtacatcccttttgggatattgtttctaatatccaggaagggagaggattatattactctcagtattgcaggcagtgtacaccttttttgtgatattgttcctaatattcagaaagggaaaggatgatattactcccaatattgcaggtggtgtatatccccctctgatattgttccttatatcaaggaagagaaagaataatattactcccaatatcaaagacagtgtagacccctcctgtgatattgtatttaatatccatggggaaagaggatgatgttactcccaatatcgcagggggtttacacccacactgtgatattattcctaaaatccagtggaggagaaaataatattgctcccaatattgcagggtgtatacaggccctcccccgttatattgctcctaatatccagcggtggagaggatattactttcaatttgtgtagggagtgtatacccccctgtgatatttttctaatatcaaggatgggaaaggatgacattactcccaatatcgcaggaggtgtacacgccctgtgatattgttcctaatatctagggaaggagaggatgatattactttcaatattgcaggagctgtacaccctctgtggtattgttcttaatatttaggttgggagaaaatgatatgagtccaaatatcgcagaaggcatacacacttccaataacattgttcttaatatccgggggagagggtgatattactcccaaaatctctggggggtgtacacccccttctgatatttttcctaatatccagggaaggaaacgatgatattactataaatattccaaggagtgtacaccttcctaatatcctaatattgttcctaatatccaggggtgggagaggattatattactcccgatatcgcagtgggtgtacacccctcctgtgatattgtttctaatatccaagctaggagaaaatgatatcactctcaataccacagggggtgtacaccttccgcatcatattgttcctaatattcagagggaaagaagatgaagttactttcaatatcggaggggttgtacacaacccctgtgatattgctgctagtatccaggaagaaaggggattatgttactccccttatagcagggggtatacacctcccctgtaatattgttcctaatatcaaggctgggatatacgtggggggaaggatgatattactcccaatatcgcaggggttatacaaccttctgtgatattgctcctagtaaccagggcagaagaagatgatattactcctaatatcgcaggaggtgtacactcccccattatgttgttcccaatatgcagaaaaggagaggatgacattattgccagtatcgcagggtgtgtacaccacccctgtaatattgttccaaatatttagggggagagaggatgatattactcccaacatcgcagggggtgtacacacatcccctgtaatatagttcttaaaatctaggggaaaaggggatcttatttctctaaatattgcagagggtgtacactccccggtgatattgttcctaatagccgggagggagataattaaattactttcaatatctcagagagtgtacatcgcccttgcgatattgttcctaatatccagagcaaaagagaatgatattactcccaatatcttaggagtgtacatttaacctgtaatattgttcctaatatccagggggaagagaatagtattactgccaatatcgtaggggttgtacaccttttctgtgatattgttgcaaatatttagtagagggaaagaatattactcgcaatatcacagggaatgtatacttcccctgtgatattgttctgatatccagaaaaagagagggtaatattactcccaatattgcagggggtgtacaccccccttgtgatattgatcctaatataaaggaaggaagaggatattactcctcatatagaaggggttgtccaccccccttgtgatattattcctaatattcagggaagcagaggatgatattattttcaatatcacagagggtgtgcagtccacctgtgatattgttcttaatattcggggggagaggatgttattatgcctgatatcgcagtagaggtacacccctcaagtgatactgttcctaataaccaggggtgaagaggatgatattactcccaatatcgcaggtggtgtacacccccccatgatggtttctaatatacagagggggagaggaaaatattactcccaaaatcgctggaggtctacaccccccttgtgatattgttcctaatatccaggaaaggaaacgatgatattactgtgaatattccagggggtgtacacccgctttgtaatattgttcctcatatccagggtgtggagaggattatattactcccagtatcgcagggggtgcacgacgcccctgtgatattgtttttcatatccaggaggggagattattatcaatatggcaaggggtgaacaccccctgtgatattgtacttaatagttaggttggcagaaaatgatattagtctcgatatcgcagggggtgtgcactccgcctggtgatattgcttttaatatcaagggggagaaaatggcattactcccaatatcgcagggggtgtacaccgctcatgtgatattgttcctaatatccaggtggagagaacataatattactcccaatatcgcacaaggtgtacacccctcctgtgatatggttcctaatatccatgggaggagatgatgatattactcccaatatcacaggggatgtacaccacccttgtgatattgttcctaatatccagggaagaaaacgatgatattattgtgaatattacagggagtgtacacactccctgtgatattgtttttgatatacagggtgggagaggatgatattactcccaatatcacataaggtgtacaccccccgtgatattgttctaaatatttcggtggggagaaaatgatattagtctccatatcacagggggtgtgtgctcctcaggtgatattgtttttaatatcaagagggggaggagattatattactttcattatcacagggggtgtacacccctcctgtgatattgttccttatatccaggcgaggggaaaataatattactctcaatatcgcaggaggtgtacacaccccatgtgatattgttcctaatattaagggggaaagaagataatattactttcaatatcacagggtttgtactcctttcttgtgatatagtttttagtatccagggggaaagagcatgatattactcccattgtagcaaggggtgtacacacctcctgtgatattgttcctaatatccagaagtggtgaggatgatattactcccaatatcgcagggggtatacaccccacctatgatattatttctaatatccatgggaaaagagtatgatattacacccaatgtcgcagagggtgtgtatttttcctgtgatattgtttctaatattcaggcggggagaagatgatattactctcaatatagcagaaattgtacatccccgctgtgatattcttcataataatcagggaaaaagaggatgatattactaccaatattgcaggggggttacacttcccctatggtagtgttcctaatatccaggaagaaagaggatgatattaatcccattatccaggaagtgtacacccaccctgtcatgttgttcctaatatccagcagggaagaggatgatattacaccccccccccgtgatattctccttaatatccaggaggggagaggctgatattactggatatatagcaggggtgttcataccttctgtgatattgttcctaatatccagaaaaggagaggatgatattacttccaatatcgcagaaggtgtacacctccctgtgatattgatcctgacattcagaaggggagaggatgatattactcaaaataccgcagggcatgtgcattcccttgtgatattgttcctaatacccagaagggaacaggataatattactttcaatatcgcagggagtgcacacccccctttggtatggttcttaatatccagaaggaaagagggtgctattactttccatattgcaaggggtgtacaccccactgtggtatggttcataatatccaggcagggagagggtgctattactccccacagtgcggggcatgtacaccctgctgcggtacggttcctaatatccagggggagagaggatgctatgactccctatatcgcggggtgtgtacacccctgtgtggtatgttttgtattctccaggaacggagagggtgttgttacccctcatatcgctggaaatgtacactcccctgtggtatggttcgtaatatccaggggattgagggtactgttacccccatactccccatatcgtggggggagtgcacctccctgtggtatggttcgaaatatccagggtaagagagggtgctattattccccattttgcaggaggcgtacacccccctatggtatggttcgtaatatccggggtgaggggatgctatcaaaagaagagagaaagagaccccccatattgttctatattattttatactcagtacctgttttaagaagaaacaaggaagtgaaaccaaaagcaggcagcccggcgccaggcaccagacccaaaaccagacccgaaaccaggcctgggcctgcctgaccttagcctgatagttaaaattcaacccatgacctagcaaccaatgttatccatagattccagacattgtatggaaggacattgtgaaatttcttgttctgtgctgtttcactctgattaccggtgcctgcagcccctgtcacatacccactagattgctcaatcaatcatggccctttcatgtaagatctttagtgttgtgagcccttaaaaaggacagaaattgtgcactcaacaagctcggattttgagacgctagtctttcgatgcttccagctgattaaaagccacttccttcactacctcggtgtctgtggggttttgtccgcgactcctcctgctacactatgactccccatatcaaggggggtgtacacccccctgtggttcgtaatatccagcaggggaaaaggtgctattactccccatattgcagggagtgtacacccccttgtagtatggatcgtaaaatcaaggggggagggaaggtgtaattatccccatatctcagggggtgtacacccctttgtggtaaagtttgtaatatccagggatattacagggatattatccccaaattaatacttttataatttcttatgcctgcctttactgcaatctctgaacataaattgtgaagatttcatggacatttatcacttccccaatcaatacttttataatttcctatgcctgtctttactttaatctcttaatctcatcatctttgtgagctgaggatgtatgtcgcctcaggaccctgtgatgattgcattaactccacaaattgtttataaaacatgtgtatttgaacaatatgaaatctgggcaccctgaaaaagaacaggataagagcgatgttcagcgaacaagggagataagcataaggtctgactgcctgtggggctgggcagaacagagtcacatttttcttattgcagaaaatgagtaggagaaatatcactgggaagggaacgcattcctaggggaggcctatggacggccgctctgggggtgtatcccttatgtggttgaagataagggatgaaatacaccctggtcccctgcagtgccctcaggcttgctaggattagaaattccagcctggcgaattctagtcagaccagttctctgctcttgaaccccgtttcctgttaagatgtttatcaatgacaatgcgtgcacagcaggacatggaacctcaatagtaattccattttctccctggccttgtgaccttgctaggcccttctgcccttgtgatcttttattgccatttgaagcatgtgatctctgtgacccactccctattcgtatccccctccccttttgaagtccctaataaaaacttgctggttttgcagatcaggtggtcatcacagaacctgccgatatgtgatgtcaccccggaggctcagctgtaaaatttctctttcgtactctttcactttatttctcagaccaggtgacacttaaggaaaatagaaaagaacctactttgaaatattgggggctagttcccccaatagacattgttcctaatatccagaaaaaaagaagatgatattactcccaatatcacaggggttgtgaaccccacctgtgatatggttcctaatatccaggaagggagagaatgatattactctccatattgcagggggtgtgcacatccctgtgatattgttcctaatatccaggggaggagagggtgatattactcccaatattgcaagggttgtaaactccaccctgtaatattgctcctaatatttaggatttagggggggagaggataatattactcccaatatcgcaggggatgtatatgccctctttgatattgttcctaatatccagggggggagaggataatattactttccatatcacaaagagtgttcacccccctgtgatattgttcctaatatccaaaaaggaagaggatgatatcaatcccaatatcacaggaagtgtacaccccccccttttatattgtttctaatatccaggggaaatgagggtgatatttctctcaatatagcagaatgggtacactccccctgggatattattcctaatatccaggggaaaaaaagaggttgatattcttcccagtatagcagggaatgaatacaccctttgtgatattgcttctaatatcaaggggaaaagaggatgatatgactcccaatatcacaggggatgtaaacctgtggcgttgttgctaatatcaaggagggaagagtatgatattactcctaatgtcgccgaaggtgcacactttccctgtgatattgttcctaatatccaaaagggaagagaatgatattacccccagtattgcagggtgtacaccacccctgtgatattgctcctaatacccaggaaaaaagagaatgctattacccccaatatctaaggggacgtataccttccctgtgatattgtttctaatatccaagtggggagaggatggttttactctcaatattgcagggagtgtacactccccctgtgatactgtttctaatactcgggctgggagaaatagtattactcccaatatcgcagtgatattgtttccctgtgatattgtttctaatatctagtgggggagataattatattactaccccatacacaggggagggtgtacattcccctgtgatattgtttgtaatatccagggaaggagaggatgttactcccaatatcacaggggttgtacaccccttttttgatattgttcctaatatctggggggcagagaattatattactgtcaatatcacagagtgtgtacaccccctctgttatattactctttatattcagggcggtagaggatgatattactccctatatcacagggggtgttcacccctcctgtgatattgtttataatatctaaggggaaagaggatgatatcactctcaatatcaaaggaaatgtacacctttcctgtgatattgtttttattatataggggggcagaggatgatattaagaacaataccacaggggatgtacacccacgtattgatattgtccctaatatgtatggggaaagaggacagtgtaactcccgatatcgcagagtgtgtacacccccttgtgatattgtttctgatatacacggggagaaaagataatatttcttccaaaattgcagggggtgtacaaccccctgtgatattgtttttaatatccagtgggggagagaatattactcccaatattgcagggcgtgtacacaacccctgtgatattgttcctaatatccagagtaggggaggatgacattactttcaatatcgcaaggggtgtacattcccctgtgatattgctcctaatatccatgaggggagaggatgatattattcctaatatggcaggggctgtacaccttccctgtgatattgtttctaacatccagtgggggagaaaatgatattactccctatatcacagaaggtgtacactttccctgtgatattgttcctaatatccagaaggggagaggataatattactcccaatatcgcaggaagcttacaactcccctgtgatattgtttctaatatccagggaggtagggatgatattactcccaatatcgcaggggatgtacactcccccgtgacattgtttctaataaccagggggtgagaggatgatattacgcttaataccgaagggggtgtacacacccttgtgatattgtgcctaatagccagggggaagaaaattatattaattttaatatttatggggaaaaaggatgatattactcccaatatcacaggggctgtacaccgaccttttgatattgtttttaatatccagaagagaagaggataatattgctcccaatatcagaaaaggtgtaaaccccttctgtgatattggtcctaatatccagggagggagagaataatattactaccaatatcacagaaggtgcccacccccaaggtgatattgctcctaatatccaaagataatagggtgatgttactcccaatatcacaggaggtgttcacaccccttgtgatattgtttctaacgtacagggaagggagaggatgatattattcccaatatcacaggaggtgtatactcctctgtgatattgattttaatattcggggggaaaggatgatattactccctatatcgcagagggtgtacaccctctgtaatattgatcctaatatccagggcgggataggatgatattactcccaatatcgcagaaagtctacacaacccccagtaatattgtttttactatccagggggaagaggatgacattactcccaatttcacagagtgtgtacactcaccatttgatattgtttctaatatctagggggagagaatatattactcccaatatcacaggaattgtacaccacctctgtgacattcttgtgaatatccggggaaaaagagaataatattactcccaatattgcagagcgtgtacacccctccatgatatcgatactaatatttttttaaagaggatgatattactcccattgtcacaggatgtgtacaccccccttgtgaaattgttcataatattctggggggagagcataatattactccccatatcgaaaaaggtgtccaccctccttataatatggttcctaatatccaggatattacttaatccaggatacttgtaataccctaaatatacaattgcttgaacctccacctcccaggttcaagcaattcttctgcctcagcctcccgagtagctgggactacaggggcacaccaccacacccagctaatttttttttcttgtatttttagtagagatggggttttgccatattggccaggctggtctcaaactcctgaccttgtgatctgcccacctcagcctcccaaagtgctgggattataggcgtgacccaccgtgccaagccaggaagaggatgctctatagatttccccaataagagatggctttgcagggccattccaaaatatgtcaaagaaatacatttggggataaaatactttgatttcctttagggaatgttatctattatgtgatgctataccagagtcaggttggagtcggttatcttattgcaacaaagagtctgttccgtcactgttgggatctctattttttcctcttatttcttgagacagggtctcactctgtcacccagtctggagtgcagtggtgcgatcttcattcactgaaacctctgcctcctgtgttcaggtgattctcgtgcctcagccccttaagtaactaggattacaggtgtgcgccaccacacccagctaatttttgtattttcagtagagatggtattttgccctgttggccaggctggtcttgaactcctggcctcgtgtcatctgcccacctcgacctcccaaagtgctgggactgcaaatgtgagctattgtgcccagccaggatctctgttttaatgttagtgctggtcactttgcatgaactccaaagggaagaaatataatgaggtgtgtctgaccccctgccttctcatcgtgacctgaattagtttttcaggtttgcaggggatacccttggacaagaaggggctctattcggttggttggggggattagaattttactttttgtttacaatatttctcctgaaagagttaggggctcacaaggaatttccgcgtgagcaacttatgaggaaagccatctgggaagatatgtgtccttgtgtcactgggatattctcgtttaccccaatgatacggcaatgacgcagggttgtgaaattacagctatgtgtttggggaaaaaagaaagcaggattgtgtgactacgtttccaaacttcacttgcccttagccatagtgagttgggggcctggagattctgttttctttcacaatgatatagatacaattaaatgtatagaaagcaaaaaaataaaaaggtgagtaatgaggaacctctgattcctgagtggccatgtagttacccatggcacagagccacagttactgaaggtaaagtttgctggggaatttagaaatgaatccagctcttggaggagtcagtttactggatgcctaagaaaatgcaaacaaaataagaaaaaagggtaatattcaatcccatagttattgttacctgtcatagctaaagtaaaattaaaacagagtgctggcttcaatcttgatgctacactaagcttagatttcagtgaatgtgagtctcagccactagctcagagccacctcccaaagaccaaatcatgtagggacaatagaaagtacttctgagaattgtggttaccaagaacctagtaactgttggggaggagcaaaacaaagtacagaaaccagagggtacaatctgagtgagactgctatcagcttctggaggagcctttactaaaatgaatgatgagagtaactggatgatgagagtaactaatggatgatgagagtaagcaatgtctttggttttcttttttttttttttttttttttagcagacgtctcactcttgtcgcccaggctggagtgtaatggcatgatctcgcctcactgcaacctccacctcctgggttcaagcaattctcctgtctcagcctcccgagtagctgggactacaggcactcatcaccacacctggctaatttttgtatttttagtattttctggtgagggtccaggtttccggaaacaactcagagacatatgttaagatgttatctttagttttcacagggaaccaaatatgttacgactccaatttccttggctattgttttaagttaccattaccttctcgttgatcaagttgctcatttacttctcaagcctagctagatgcctggaatttcccttgaaggaagtcaagattttcctttatctccatactggctgatggtgatcgagtaagcccctaagaggggtccctgctccatctcgagatgctgctagattctacagtgcctaataaacagctctcgcctggccgacaaagagctgcttgctctctggatagcaattccaaagtgaacagacaacatcctgtttggaagactgccactctgttagaagaagcatcaggaaaacctttcttttgagctatttataactaacagcaattgaccaagtatacttttgtgagtgaaactgacctttctccctgtaagaattctccaaaatttggaaactatttgtgagtatttttacttatggcaatataattattggcacaagctcaatcagattcggttttctttcgtaacaggaaccattggagatactcattactctttgaaggcttacagtggaatgaattcaaatacgacttatttgaggaattgaagttgactttatggagctgataagaatcttcttggagaaaaaaagactgggtatattttcaatatgctttccttttaaggtccctcacctgtggaaagtaaagaatgtcactttctgacaggctcaggaacctcaagttatgtagggatctcaagaagatgggggaattcacccagttcatacaggtgaaattgctgttgcaaagattatgaatatgagagaagtccagcatggctgacttcatctcgtgtctggcctcaggctggctgcccttgctcactcttgggcataggccaagctagccatgggaggaatttagtttatagtttaactttgaagcacggatgataatagtctctccctaaaatgaaccccttccttgctcagggactgaaactacctttgtatgacaaatgaaagcccacaagattaagattatgagaggggcctgaattctgctaaaatgcaggtgtagctgactgataacaagtcattgtcccacagcttgcctttctataatctcttgcttctcaggagtcacatggccagaggtcctgagatttccagtcctgtgacccccacccagagatggacttagtgcatgaggaccattttccacacccctatgatttcatcctcaaacaatcagcagcaaccattccctagccccctgccttccaaattatccataaaaatcctagcctctgagttattagggagattgattaataatcccagtcctaccccttgggttgctctgatttaattaaaccttctctactgcaataccacggactcagtaaattggttttgtctgtgcaatgggcaagaagaacatgttgcatggttatacaggtactacaagcacagtctgatggcaaattattggttttgcttcctgcccttgatgtttctaaacatctagtccaaaattacttgtgaaaggtccagcaaagccaattttaaaagaggctatatggccaatcactattctttctacacattattgcaaataatcaggccacggctgggcacggtggctcatgcctgcaatcccagcactttgggaggctgaggcaggatcacctgaaatcaggagttcaagaccagcctaggcaacatgataaaaccctgtctctactaaaaatacaaaattagccaggcatggtggcatgcacctgtaatcccagctacttgggagactgagggaggagaatcacttgaacctgggaggcagagattgcagtgagctgagatcacaccactgcactccagcctgggcaatagagtgagactttgtctcaaataataataataataatcagaccaagtataatgaaattaaaatttattttgcaaataaattggtcctactacaatttatccttcatagaaatgtggaaactgaagataaaaaaaattaggtttcagaagaaaactatactacacctgttattagattctagccctaaacattgtttttgaggtttttattatttacctgcaatttggtctaaattctgaattatttcctgactacaagtatccaaggaataaatgggttttctttttctttatgatagttttagttggcttctaatgcaacaacaatttttattgtaatcctgtgtgcattctattcctactattcaaattattaatgttatagatctttcattgtagtacttctgaattaaccaaaatcacagtattctgaagatgattctacaaagcctgctgtttctacaaaggctgctgatgatttctacaaagcctgctgtagtgttgctgtggcctctgcttaaaaaagtagaaaacacattgatgcagcatgttcaccccaacctccctgcctaaaggctcagggaccatcttggaagaggaaggcgcgtgagattgtaagagccgaattagggggatggagtgtggagaataaggacacttcatcttggatgctcacctgccaaattgacttctgatgaaagccagctccagaaatgtgcctacagttactactttcacctaaaccctgcccttagtcaaatccttctcttcttctaagcaatcaacttcaattccttgtataacccacagtataaaagggcttttataccattctatcctattgcatgtaagccttgggtctgggaggtaacagtgtgggattccaccatctcatctccctgccacccaaacatgcctgctcttctttaagcaatattaaatgtttgtacttcagaaatttgatttgtcagcctcttcttcagactctcagcttctttggcctttgggagtaaatttgcataggcctgctcaaaacaggatgttctgggggtttgggggtgttgttttgttttgttttttgttttgtttagagacagggtctcactctgtcacccaggttggagtgcagtggtgcaatcatggcacactgcagcctcaaactcctaggctcaagcaatccccccaccttggcctcccaaagttctgggattacaagcataagccaccatgcccagccctggacttttctttaaagacatttacacagtgtaggaattactgtgggtgcactgctcaggtccccttctccaggatgctcattcctacctcatagatgattttcctgcagagatttgacctcagctgaagggcagtcacctggtccaggtggttgctattcacctccttcctgagaacagccaacagccagggacacgctagcacagagatataagagcgaccaaggtgaggccccttctgtgctgcggtgcatgctccagagcctccctgggatcagacttaagagggtctccagccagatctggtcttcgctgctttcctcgagctccccagcgcactcctgcaatgcatcttttttttttttttttttttttttgagacggagtttcactcttgttgcccaggctggaatgcaatggcgcaatctcagctcaccacaacctctgcctcgcgggttcaagtgattctccttcctcagcctcccaagtacctgggattacaggcatgcaccaccacgcccagctaattttgtatttttagtagaaacgggtttctccatgttggtcaggctggtttcgaactcctgacctcagttgatcctcctgcctcagccttccaaagtgctgggattacaggtgtgagccactgtgcctggcccaatgcacctcttgaatcacctcctcatgctttgcttttagagaacatgatccccaacatgtgattccagcaaagattctagaaagccaaccgtgacaatcacttctgggtttagatgacccccccccaccacaagatggcagtgagcacctcatcacagaggtgctgatggtctgcagcaccgcgccaggccagaacgtgccttttacagaagaaaataacccagtagctgactaggatggtgaggagggctggtgagcactgcggtagtgagagggacactagcatcactgagatgcaagtgatggtcatttttcataggtcaaagctcaaagcaggggacagttacagggcagggcttcatagcaccagtgtgatgaaagtatctgggagtggctaaggccagcactatgccatgggaagcaaggtgggcctgaggaggaggcagcagcgtcagcctgcaacaagtgggggctgccctgcagagacctaagagtcatgttatagagcacagtgtctgtaaggccaagaagtgtggacagccaagtgtgtcaattactagacatactcaagaggagcaggaagggcagggcatggtggctcatgcctgtaatcccagctacttgggagactgaggaaggagaatcgcttgaacccgggaggtgaaaattgcaatgagccgagatttcgccactgcactccagcctgtgtgatgggagcgggactccatctcaaaacaaaaaaagaaaaaggaaaaagaaaaaaagaaaaacctaggtatacttctcaagcaaataaaaataatcaaaaccaatatcatgcccgggcacaaatttcatatatataacagatttaaatatatgagggtgattatcctctcatatctccatttttttttgtttttccatttttttctttactaaaaaaagttaatgccaatgacacacaatttttttttttttttttttttttgagatggagtctcacttcttcgccctggctggagtgcaatggcgtgatctcgactcactgcaaagtctgcctcctgggttcaagcaattctcctgcctcagcctcccaagtagctgggaccacaggagtgagccaccacacccagctaatttttgtatttttaatagagacggggtttcaccatattggccaggctggtctcaaactcctgatctcaaataatctgcccgcctcggcctcccaagattctgggattataggcgttgagccactgcgccccgcctatgtatgattttttttttaattttattttcataagtttttggggaacaggtggtattttgttacatgagtaatttctttagttgtgatttgtgagattttggttcacccatcaactgagaagtatacactgaacccaatttgtggtcttttatccctcacccccttcccaccctttcccccggagtccctgaagtccattgtatcattcttatgcctttgcatcttcatagcttagctcttgaacccttactttctgtttgagggagaagacatatcatctacaagtagatactgtgtaaacattccattgcatgactatcccataacttatttattatttgtgtttggttatttgctgctatgtaacaaccccactcccaactaaatggtgtgacaattccatgattctgtggatcaaaaattctgaaaagtcaaacccaaggagttttgtctctgctccatgatgctaaagcctccgcaggggtgaggcgaatggctcagggtgactgaaaagctcagggttggaacagctggggatgaggcctctatgtataagatgattcttcactcacaggtctgaaactatggtggggacagccagaaggctcggctcagctgggacagtcacctgagccctacacatgacctctccaacatggtgatcctgaagcagttgggtttcttacacagcatcacacttttcttttttttttttttttttgagatgaaatattgctctatcacccaggctggagtgcagtggcacgatctcagctcactgcagcctccgcctaccaggttcaagcgattctcctgctccagcctcccaagttgctgggattgcaggcgcctgccaccaagcccagctaatttttgtatttttagtagagacggggtttcaccttgttggccaggctagtcttgacctcttgacctcaggcgatccgcctgcctcggcctcccaaagtgctgggattacaggcatgagccaccgcgcccggccaaagctcacacttcttatgattcagccttagatgtcacatcagttcattttccccacacttattagtgttagaagtcacaagcccacccatactcaggggactggcacacagaccccactctcaatggaaggggtgggacaccaccattcctgctgatgggcatttgggtaacttcctgtttgaagctattaagattgggctgctgtggccgggcgcagtggctcacgcctctaatcccagcactttgggaggccgaggcgggcggatcacgaagtcaggagatcgagaccatcctggctaacacggtgaaaccccgtctttactaaaaataccaaaaaaaaaaaaaattagctgggcatggtagcgggcgcctgtagtcccagctactcgggaggctgaggcaggagaacggcgtgaacccgggaggcggagcttgcagtgagccgagattgtgccactgcactccagcctaggcgacagagcaagactccgtctccaaaaaaaaaaaaaaagattgggctgctgtgactattctagtaggtgtctttggtgagcgcctacacgtgtttctctttttctctttagtatatgcccaggaggggaactgctggctcccagataccgtatgttcagggtcacacacacttccacagggttttccaaagcccttgtaccagcacgcactcccagcacctgtgtgactgctccagctgtcccacagtctcatcagttctattgctgatattttcattttagcttaagttatatttaataggaaaattaccgttgcctctgccccccgttcctgcctgtaggagtttctcgtagctgttgctacaggtggccacaaatctgtcacttaaacccacacaaattgatgtccttatggctttggagtcagaagtgtcaactgaaggtactagcagggctgtactgacctggtggcctcagggagcatctgtgctgcttctccaccttctagaggctgctgcatccctcgctccagccccttcctgacaccactcaccctcctacttctgttatcacatcctcaccttctctgtgttcagggctccctctgtctctctcttgcaagcacacttgggattccattgagggccacccacataacccaggagaatttctccacctcaatatccttaacaactgcagagcccttttgccataaaagttaccattcacgggttccagggattgtgacatgggtagctttaggagtgattattcctgcctgtctcccgctcaccagaacttggactttctctctcaacaggagccccctgtgtgggaatagcctgtctcaacgacgccctctataaggacctgcttcctcaaaggacctcatagtcgggtcctgcccctcagtgtccagtctgccttggctggaggggctgcaggggtgtgttggcgccacctggtggagacagggcatcacagcaggtgggagcccagtagaagcacaaccaaaacatgggtaatgtttaaaattttctggctaagcgctgtggctcacgcctgtaattccagcactttgggaggccgaggtgggtggatcacatgaggacgggagtttgagaccagcctggccaacatggtgaaacatcccctctactaaaaaatacagaaaaattagctggacatgtggcgcgctcctgtaatcccagctactcgagaggctgagacacgagaatcgcttcaaccccggaggggttgccgagatcgcgccactgcactccaggctgggcgatagagcgagactctgtctcaaaaaaaaaaaaagaagaggggaggcgaggggaggggaggggaaaagggggaatttgtttggagctgagacatccatcttctcctgacctcagatatttgcactcctggttatgaagccttcacacttggactgaatacaccaccagctttcccgatttccagcgtgcaaatggcagatcgtgagacttctcagcttccataattacatgagccaatttatatatataaattgggtcctccagaaaaacagaataaattatatatataattatacgcataacttaattaaattatacgtataacttagctatatatataatttattctgtttttctgaagaaccctactgacacaaatgttgagcatcttttcatgtgcttattggcttaataacttgtacatcttctttggggaaatgtctattcaagttctttgcccattttgtaactgaactattaatatttgtctttacattgttgagttgtaaaagttccttatatattctagatactagagccttatcagatatatttctgcaactattttctcctaatatataggttgtgtttttattttctttttctttttttttttattgagacagtctcactctgtcacccaggctggagtgcagtggcatgatcttggctcactgcagactcgacctgccaggctcaagcaattctcccacttcagcctcctgagtagctgaggttataggcacttgccatcgcacccagctaatttttgtattttttagtagagccgaggtttcgccatgttgcctaggttggtcttgaactccctgcctcaaagcgatctgtcagcctcagtctccctaagtgctggaagtacaggtgtgagccacagtgcccggccatctattttcaatagtgttttttgatgtacacaggtttggaattttgataatgttcaattcatccatttttttttttttttttttggttctttctactggaccaccactcttgagccctctaatccaacctccacgcggcagccagagggagctctctaaatgtaattactctttccctgctccacctgctcaaaacagtgtcacatttgtgatttaaaacagtatttctcaaacctaatttgcaaacaaagcaggtggaactcttcttgtatgcacagcatctgatttggttggtctggcatgggtctgggagtgagcacacctaccaagcggctgctggggtaacttgcgttttccactgatgatttcagcaatgtttccggtcccacatgctcctccagaaccttgtactcccccatgaaaaggtggagtccatttccccttcctttatttatttttttgagacgaagtttcactcttgttgcccaggctggagcgcaatggcgtgatctcagctcaccgcaacctccgcctcctgggttcaagcaatgcttctacctcagcctcccgagtagctgggattacaggtatgtgccaccacgcccagctaattttgtatttttagtagagacggggtttctccatgtcggccaggctggtctcaaactcccgacctcaggtgatccgcccgcctcagcctcccaaagtgctgggattacaggcgggagccaccgcgcccggctatttccccttcctttgaacctgatcaggacttgacgatggcatcaacatggtgagagtgaccctgcatggcttatgaggctgggttacacaaggcgatgttgcttctgactggctccctctcaggatacatgcccttggaacccatcctctaagctccttgggagcccaacttagcccatgtggagacaagacagggagagaaacagaggcacccccagccctcagccagcatcaaccgccagacaggagagcaaatgcgccaacaatgattccagctgaagcctcagacagcgtggagcagagatgagggatccctgcagattgcagatgcgtgagcaaaatgcatgctgtcactgttttgaaacaacaatgtctgggggctgtttgttatgcagcaatagacagctgtaacaatgctgttactgctgtattccatgaatgactgcactttgagtagcagggggctagatcactagataagccccatggcttctgtgtatgctatttttctacttttatatccttttcattcactttttttttttttttttttgagacagagtctcactctgttgcccaggtgggagtgcagtggtgcaatcttggcggactgcaacctccacttcccgggttcaagcaattattgtgcctcagcctcctgagtagctgcgactatagatgcacccccatgcctggctagtttccgtatttttagtagagacggggttttgccatgttggccaggctgatctcagactcctgacctcaggtgatccacccaccttggcctcccaaagtgctgggattacaggcgtgaaccactgcacccagcctcattcactttctttacttggctcatttttccttgttgcctcaattctcctctaagatcactttcctgacatttcagcctgggcctgttgccttctctgggtcccctccgcctcctgtgcctcccccatctcagccttgatccctcagattatacttcctctgtccccaccctgaccatcttggctgtccctggatagggatgggtatcttctcccactggtctgggagatctggaaggacaggcctggaaaagacttggtcactgctggaaggagctcagttagtgtggtgctgaggacagtacgggtgaggctggccccttcacccaaactcccactctcttccatagatttcacctctgtggcccaggccataggattagggcaactccccttaaacatcgagtccatcctccaagctgtccttttttttttttttttttttttttttgagacagagtctcgctctgttgcccaggctggagtgcagtggcgcgatctcggctcactgcaagctccacctccagggttcactccattctcctgcctcagcctcccgagtagctgggactacaggagcctgccaccacacccggctaattttttgtatttttagttgagacggggtttcaccgtgttagtcaggatggtctcgatctcctgacctcgtgatccgcccgcctcggcctcccaaagtgctgggattacaggcgtgagccatcgcgcccggcctcatgctgttcttgaatagtgagcacctgttacaagtcgccccaccagcctctcacttgtacccccctcatctctttctccccaagagacagaggaccctggcacttgtgaagcatgacccagaccctggggccatggcatccaacatcctcattccccatgacccctactgtctagatgtagctgccaagagacccccagactccccgggcctctgtctagagtgccaagacagagagagaatgccctgccgcttgcatgctttgtggggtgtccttcccccttccctggctgctaggcgtgacttcaacgttctccccaacccccaaacagcagcactgacaccagctgcagacctggctcaggttagctaatgaggaccaggctggggatggagcctgaacccctaaaccccagtcctgtaccccaccctaatcctggggtctccactggacaaaacgaagcagcttggtttttcgttgttattgtttttgagatagagtatctctctgtctcccaggttggagtgcagtggcgtgatctcagctcactgcagcctccgcctcccgggttcaagtgattcttgtgccgcagcctccccagtagctgggattacaggcgcgtgccaccacacccagctaatttttgtatttttagtagagacagggtttcaccatgttggccaggctggtctgaaactcctgacctcaagtgatttcccagcctcggcctcccaaagtggaagcggcttatttttaaggagaaaactcccgtggaaaggaatcagcacctcctctgtcaacatttcacttctctgaaaagactctcacttccaacagaaagtgctttgtaacacaacaatgaggctgggcgaggtggctcatgcctgtaatcccagcactttgggaagctgaggcgagtggatcacgaggtcagaagttcgagaccagcctgaccaatatggtgaaaccccgtctctactaaaaatacaaaaattagttccgtgtggtggcgtgagcctgtaatcccagctactcaggaggctgaggcaggagaatggcttgaacccaggagatggaggttgcaatgagccgagatcacgccactgcactccagcctgggcaacagagtgagactccgtctcaaaaaaaaaaaaaaaagaatgagaacatatggacacagggaggggaacaatacacacaaacaaaatttagaaacaggtgaaaataattttagtaatatttttactaatactgatatgctcaaaatattattatttcaataagtaatctaaaaattattgagatgtcttatgttcttttcatcatactaagcctttaatatttggtgtgtattttacactcacagcacatctcaatttgcagtccccatgtttcaagcactaaataaccatgtgtgtccggtggctaccatactggacagcgttgatctgaaatcgcatctgtatgcatcaccagcatatttgcagagatccccatctcagcagcacacctgaggctcatctgcgaaagcacctgcaacttctctacaacctcccacatcacctccaaacacatcctcatgtcatctgcaaacacacccatagctcacaggccaatgcctaaatatcattgcaggcaccttcagagaaagcacttactaaaggggtatacttgattccacatctgctttgacctgcaaatctcccttctcctttacatacatttgcatctcatttgtatgtcaatctaaatccactggcagagcctcagatcatcatctcaaagtcaggtggatgtggggctgggcaggcctccaggtgttcctcctcctgcttcctctggggctcttgatcctcctcctcttccttgctgctctcctcctcctcctccaatatggtgaccagttcctcccgcagcgcccccatctccagccccaggctgcacagctgtcccagcagctggacatccactcggcgcaggttcccctgccagtaggaaggggacgtcacagggatgccaccccagagagcaaggggtctctccaggacctgggtgagagcaggtcccaactcatgtcctggccacagcgcctgggcagggtcctcactgtgcccatggaccctaactgccttcctgcttctcagagtgtctcttgatctctaactcttctctttgtctctccatttcattgtccctgacttctctctctctgtctcctccctctcttatctatatctgtccctgtttccctttgtctctgtccccatttattttttgtctttccatgcccctgtctctctgtctttatgtgttgccatttctctgcccctgcctttggctctctttctctcgcttgccctctctctgccctccccaactttctcaaattcagtctgtctctccatctctgttcctgctctccgtctctgcttcccacctctgtccctctcttttgggatctccctgtccccacctctgttcccgtccctcactctatgtctgtctctcggtgtctgtacatgcctctcatgtctctgcttctatctctcagattctgtttttcgatctctggccttctctatttttgttcatttccattcattctcatttcctctctttctctttcccttccaaacccctcactcaccagctcctccctgatccacagcagactatcgcaggcacctccagtgtctgcccctgcagtcctgagggtctgaccagggatttccactggggagacctccctcagggcctgggggggtgggcccagccccggaggcaccagtccagcctgattcagctgcctccacagttccatcgtctctgagctatggctgcaaggagcaggaagtagcaaggtccagggtggcctggtcccctggggagctgtgtgcgtggtggagagtaaagggcagagggagtgggatgggggttcctgggaaaggtatcccaaagtccactcttcagagagaatcagctggccttgtgcttttctttttccttctgaagtctaacctcaactctgctcacagggttcaaacatagcctcttgcagaggtctaactccacccttccctgcctgtctcaggcctgacccctcaggggcgctcagtgtctgtagatgcctggcaccctctgtccttccacctgccccccaccaccacttctccagcctctcctcagcctccatttgacctctggcttgcccatagcttggtccttgcttgtcctcttggcacgggtcatcctagggctttcccaccagtgtgcctttgggggcaggaatggctcccaggggcaccaagacagcaatcccttagctggagtgcctgtgtccaggctgctggcctagggccaagcagccaattctgctgaccctggacttgcctatgggtatattatccctgttgagggtgagggcttctgctgtggaaaagtctgggaagcactgcaggcctctctcggccttggacccttccttcagacccaaggtgcatatatatacatatatataatggtagatcacgaggtcaggagatcaagaccatcctggccacatggtgaaaccccgtctctagtaaaacacaaaaaattagccgggcatgctgccgcgtgcctgtagtcccagctactcgggaggctgaggcaggagaatggtgtgaacccaggaggtggaggttgcagtaagccaagatcacgccactgcattccagcctggcgacagagcaagactccatcttaaaataaacaaatgaacaatatatatatatatgtattttgttttttgagacagagtctcgctctgtcatccaggctggactgcagtggtgcaatcttggctcactgcaacctccgcctcccgggttcaagcgattcccctgcctcagcctcctgaacagctggggttacaggtgcacgccaccacacctggcgaatttttgtatgtttagtggagacggggtttcaccatgttagccaggctggtctcaaacccctgacctcaggtgatctgcccacctcggcctcccaaagtgctgggattacaggcgtgagccaacgcgcccagccccaagtcccttttaccatagaaagtaacatagtcacagtgcccagggattcacaggtatggggagagggttcgttattcagctgccacacccaccttcctaaacctgctgcccttccagtttcctcacgtgcacagccacgcccgtctgcttttagtttctcaatctgttggcttaaccttcaaaacaggcccaggatttgagcacttctcaccattccctctgccccatccccattcatctcttgcctagactgctacagcagcctcttttactggtcccctgcatccacccttgccctctaaggcaagggtccccagtccctgggccaaggaccagtaccagcccctcgcctgctaggaactgggccgcacagcaagagatgagcagcgggtaagtgagcattaccgcctgagctccgcctcctgtcacatcagcagtggcattagattctcataggaggcaaaccctattgtgaactgtgcgtgcgggggatctaggttgcctgctccttatgagaatctaatgcctgatgatctcaggtggaacagtttcatcccaaaaccatccccaccccacccccgacccccagtctatggaaaaattgtcctccacgaaaccagtccctggtaacaaaacggttagggaccgctgctctaaggtacattctccacctggcagaaataatctttacaaaatgtaaatccgattttgacactcccttcttcccactgtgaatagaataaaaccctaccaggcctgcaccgtcagcccctgcccacctctcaacccagtctcctatctctgtctgcaagctggttcccacctcaaggcctctctgctctagaggctacctctccctgcagcgcttttcccctagatctttgaatggctctttccttatcattcacttctacttcaatgtcacctcttcagagaggcctttgctgatggccctacacccagtcacttttttttatctgcttctcatcaaaattgccttgctgattcctttgtttcttattcatcctctcccacatccatcctctcccagcccagaatgttgacttcctgagagagggactgggtctgtcctgctcaccatggtaacctcggcatctagaacagtgcctgccatcacgtggtaggtgctcagtaaatattcttggaactaatgaatgaataattctatccacaagacttcacaatggctcttcatgctgcgatctagctttcaactccaaactggtcttgagatctcacctcagtctctaaccttgacatctaacctcttcacccactctcttacctgaccctaatttttaaaaatgacgtggtcagcttttcagccccctcattccctgtttttaggaggtagtgagtggaagctggaagaataagaaagcttggggagactgcaattgcagtcaggaaagaaaggtactctgccgggaagaacaccccatcttctcctagggaaagattgtggagtcctggggtttgttttgtttttcaattttttgttttaagagacagcgtctcgctctgtcacccaggctggagtgcagtggcgcaatcacagctcactgcaacttcgacctccccggctcaagtgatccccccgcctcagcctcgtgagtagctgggaccacaggcgtgcaccaccacgcccggctaacattttattttttgtggatataaggttgccctatttctttgtggagataaaggctcccctatgttgcccaggctggtctcgaactcctggcttcaagcgatgctttcgcctcggcctccacaaagtgctgggttcacaggtgcgtgagcccgacctgtgtctcgttttgaagctcagggagagggcgctgtgagcaatccctaaaccctttaagagtaaaaagtgcgtgcacctttaagaggacggttagaaaacgcggggcgtggccacaggagaataagttcgcgctgaaccaggagcgtgggataagaccggccccttccggttacgaaaccttagcaagatggcggctccctgggcgtccctgcgcctggtcgcccccatgtggaatgggcgtatcaggggcatccatcgcctgggtgcggcagtggccccagagggcaatcagaagaagaaaaggacaatactccagttcctgaccaactatttctacgatgtggaggctctgagggattacttgctccaaagggagatgtacaaggtgcatgagaaaaatcgatcttacacctggctggagaagcaacatggtccatacggcgcaggtgcctttttcatcctgaagcagggaggcgcagtcaagtttcgagacaaggagtggatcaggccagataagtatggccatttctctcaggagttctggaatttctgtgaagtgcctgtcgaagctgtggatgccggtgactgtgacatcaactacgagggcctggataacctccgaacctccgcaggctggacatctcggacctccctgccgtgtccaaccctggcctcactcagatattggtggaggagatgctgcccaattgcgaggttgtgggagtcgactgggctgagggcctgaagtcagggccggaggagcagcctcgggacacagccagccctgtccctgcctagcctttagccctgtccccactcacgtggcttctcagcgggctgcatggaatgtctggtagctcaccacacttctggcttccatttgtcttcactcaacgtcagggtgggggagtggtgctggccaatcacaggagagagcgtgagttcccagtatttattcctggctgcccttggctaaaggtcacagctcctgtcaccctgtcaggcagccctttccatgcccctgttcaggcctggggaggtaaaggctcaggctgttagtagccgcagagagccacactcaccttgtcaggagactcttctcaaactgtccttatgtgagtgcactgccatttcttgcagggaccctgactgacacaggggctactactgacactttacagggatggttctcccccgtgcagggccgctgtgcccactgcaggacatgcagcatccttcgccccactccactcactaaaggccagcgcaccccaggccccatagtattgctggttatggatttattgactttatgttccaaattcagctttttcagttggctgttttttgaaaggggataagctttgtcagtagagggcaccgaacaggcattataggaggaaaggcgcctccttcgtggttcttgttggttgtgcttctgcctctggacgccgcagtgcatgtggcttccccagcacccagctcctgaagcaccaggcggtcagcagctgcccttggcaccctccagccctcagaagttgcgtaggagacacagcgcctccactgaggcacctctctgggaataacgttccccagcaccccaaatggatttccagtcaattcagaagcattttaccagtgaagccctcattattccagttcactgttaaagccagtaattctctatattaaactttccctgttcggtttatactccggagtataaaccgaacaggcctgccatagaaaatgcaaccacagaaataaaatggattgctttttttccctgtagtgaaaatacatttaaatctatctca
